(19) United States
(12) Patent Application Publication
(10) Pub. No.: US 2022/0251595 A1
(43) Pub. Date: Aug. 11, 2022

(54) ENGINEERED ATRLP23 PATTERN RECOGNITION RECEPTORS AND METHODS OF USE

(71) Applicant: Two Blades Foundation, Evanston, IL (US)

(72) Inventors: Freddy France Guy Boutrot, Mirebeau (FR); Carolina Grandellis, Norwich (GB); Kamil Witek, Norwich (GB); Cyril B. Zipfel, Zurich (CH)

(73) Assignee: Two Blades Foundation, Evanston, IL (US)

(21) Appl. No.: 17/621,899

(22) PCT Filed: Jun. 26, 2020
(86) PCT No.: PCT/US2020/039730

§ 371 Date: Dec. 22, 2021

Related U.S. Application Data
(60) Provisional application No. 62/867,327, filed on Jun. 27, 2019.

(51) Int. Cl. C12N 15/82; C07K 14/415; C12N 9/12

(52) U.S. Cl. CPC C12N 15/8279; C07K 2319/00; C12N 9/1205; C07K 14/415

(57) ABSTRACT

Compositions and methods for enhancing the disease resistance of plants are provided. The invention provides compositions comprising engineered, pattern recognition receptors which comprise one or more domains derived from the receptor-like protein AtRLP23, particularly a leucine-rich repeat domain, and one or more other domains including, for example, a kinase domain from a receptor-like kinase. The compositions further comprise nucleic acid molecules encoding the engineered proteins and plants, plant cells, and other host cells comprising such nucleic acid molecules and/or the engineered proteins. The invention additionally provides methods for making and using the engineered proteins and nucleic acid molecules encoding the engineered proteins.

### CROSS-REFERENCE TO RELATED APPLICATION

[0001] This application claims the benefit of U.S. Provisional Patent Application No. 62/867,327, filed Jun. 27, 2019, which is hereby incorporated herein in its entirety by reference.

### REFERENCE TO A SEQUENCE LISTING SUBMITTED AS A TEXT FILE

[0002] The official copy of the sequence listing is submitted electronically via EFS-Web as an ASCII formatted sequence listing with a file named 070294-0169SEQLST.TXT, created on Jun. 23, 2020 and having a size of 963 kilobytes, and is filed concurrently with the specification. The sequence listing contained in this ASCII formatted document is part of the specification and is herein incorporated by reference in its entirety.

### FIELD OF THE INVENTION

[0003] The present invention relates to the fields of plant disease resistance and crop plant improvement, particularly to making engineered plant disease resistance proteins and using such engineered disease resistance proteins to enhance the resistance of crop plants to plant diseases.

### BACKGROUND OF THE INVENTION

[0004] According to the United Nations estimates, the world's human population is expected to increase by nearly 1 billion by 2030 (United Nations, Department of Economic and Social Affairs, Population Division (2017) “World Population Prospects: The 2017 Revision, Key Findings and Advance Tables,” Working Paper No. ESA/P/WP/248, p. 1). Due to the projected increase in world's human population and also the projected loss of land available for agricultural production, agricultural scientists need to increase agricultural productivity to keep pace with the growing demand for agricultural products for consumption by humans, livestock, aqua-cultured organisms, and pets. A variety of strategies will need to be employed to increase agricultural productivity, which may include improved crop plant cultivars and traits, new and improved agricultural chemicals, improved fertilizers and biologics, and improved crop production systems.

[0005] While synthetic agricultural chemicals will continue to be important for intensive crop production in developed countries, many farmers in developing countries cannot afford to use synthetic agricultural chemicals on their crops. Additionally, in developed nations, consumers are demanding sustainably produced food products. The sustainable intensification of agriculture will require increased use of genetic solutions instead of chemical solutions (e.g. synthetic pesticides) to protect crops against pathogens and pests (Jones et al. (2014) Philos. T Roy. Soc. B 369:20130087). Such genetic solutions include, for example, crop plants which have been bred to be resistant to pathogens through introgression of naturally occurring resistance (R) genes which provide the plant with resistance against plant pathogens such as, for example, bacteria, oomycetes, viruses, fungi, and nematodes.

[0006] While R genes have been successfully used to enhance the resistance of crop plants to plant pathogens, the resistance conferred to plants by most R genes has not been durable as pathogens evolve to overcome the resistance provided by the R genes. The reliance on monocultures in modern agriculture promotes the rapid emergence of new virulent isolates of plant pathogens, because plant pathogens experience a strong selective pressure as cultivars with new R genes are released (McDonald & Linde (2002) Euphytica 124:163-180). Thus, to stay ahead of the rapidly evolving pathogens, it is imperative for plant scientists not only to discover and integrate new R genes into crop plants, but also to develop new strategies for enhancing the resistance of crop plants. Such new strategies may involve plant proteins that have roles in the very early stages of the plant signal transduction pathway that is initiated following a pathogen attack such as the pattern recognition receptors (PRRs) that plants employ to detect pathogen-associated molecular patterns (PAMPs).

### BRIEF SUMMARY OF THE INVENTION

[0007] The present invention provides methods for making engineered AtRLP23 proteins. AtRLP23 is a receptor-like protein (RLP) that is a pattern recognition receptor (PRR) capable of recognizing, in a plant, pathogen-associated molecular patterns (PAMPs) derived from the necrosis- and ethylene-inducing protein 1 (Nep1)-like protein family of PAMPs that are known to occur in bacteria, fungi, and oomycetes. The engineered AtRLP23 proteins of the present invention are synthetic or artificial (i.e. non-naturally occurring) proteins. In some embodiments, the methods for making engineered AtRLP23 proteins involve producing chimeric proteins that have the receptor function of AtRLP23 and the kinase domain derived from a receptor-like kinase (RLK). In particular, the methods comprise producing a polypeptide comprising an amino acid sequence having the following domains in operable linkage and in an N-terminal-to-C-terminal direction: the leucine-rich-repeat (LRR) domain from AtRLP23 or a derivative thereof that is capable of recognizing in a plant, a pathogen-associated molecular pattern derived from a Nep1-like protein (NLP); an extra-juxtamembrane (eJM) domain, a transmembrane (TM) domain, and a kinase domain derived from an RLK. If desired, the polypeptide can further comprise a signal peptide (SP) domain that is operably linked to the N-terminal end of LRR domain. The SP, eJM, and TM domains can be derived from AtRLP23 or one or more other PRRs, particularly one or more other RLPs.

[0008] The present invention further provides methods for making recombinant nucleic acid molecules that encode the engineered AtRLP23 proteins of the present invention. In some embodiments of the invention, such methods involve synthesizing in vitro nucleic acid molecules that encode the engineered AtRLP23 proteins of the present invention. In other embodiments, the methods involve genome editing to create in plant cells genes nucleotide sequences that encode the engineered AtRLP23 proteins of the present invention. In still other embodiments, the methods involve both in vitro synthesis of at least a portion of the nucleic acid molecule or sequence encoding an engineered AtRLP23 protein and genome editing.

[0009] The present invention further provides of methods for producing plants with enhanced resistance to plant pathogens comprising modifying a plant cell to express an engineered AtRLP23 protein of the present invention. In some embodiments, the methods comprise modifying a plant cell by introducing into a plant cell a nucleic acid molecule or sequence comprising a nucleotide sequence that encodes an engineered AtRLP23 protein, and optionally regenerating the plant cell into a plant comprising the nucleic acid molecule or sequence stably incorporated in its genome, wherein the regenerated plant comprises enhanced resistance to one or more plant pathogens, particularly plant pathogens that comprise an NLP, more particularly bacterial, fungal, and oomycete pathogens that comprise an NLP. In other embodiments, the methods comprise modifying a plant cell by modifying the genome of a plant or at least one cell thereof to comprise a polynucleotide comprising a nucleotide sequence that encodes an engineered AtRLP23 protein using genome editing methods to cause single-strand or double-strand breaks in specific locations in the genomes of cells, whereby a plant comprising the polynucleotide is produced and comprises enhanced resistance to one or more plant pathogens, particularly plant pathogens that comprise an NLP, more particularly bacterial, fungal, and oomycete pathogens that comprise an NLP.

[0010] Methods of using the plants of the present invention in agricultural crop production to limit plant diseases caused by plant pathogens are also provided. In some embodiments, the methods comprise planting a seed, seedling, a tuber, or other plant part, wherein the seed, seedling, a tuber, or other plant part comprises a nucleic acid molecule comprising a nucleotide sequence encoding an engineered AtRLP23 of the present invention. In some other embodiments, the methods comprise planting a seed, seedling, a tuber, or other plant part, wherein the seed, seedling, a tuber, or other plant part from a plant that has been modified to be capable of expression of at least one engineered AtRLP23 of the present invention. The methods further comprise growing the plant under environmental conditions that are favorable for the growth and development of the plant, and then optionally harvesting from the plant at least one seed, tuber, fruit, flower, or other plant part or parts.

[0011] Additionally provided are the engineered AtRLP23 proteins and nucleic acid molecules encoding the engineered AtRLP23 proteins of the present invention. Further provided are plants, plant parts, seeds, fruits, tubers, plant cells, other host cells, expression cassettes, and vectors comprising one or more of the nucleic acid molecules of the present invention.

### BRIEF DESCRIPTION OF THE FIGURES

[0012] FIG. 1 is a graphical representation of the protein domain structure of the receptor-like proteins (RLPs) AtRLP23 (SEQ ID NO: 2) and AtRLP42 (SEQ ID NO: 4), of the receptor-like kinases (RLKs) AtEFR (SEQ ID NO: 6) and AtSOBIR1 (SEQ ID NO: 8), and of the chimeric receptor AtRLP23-eJMAtRLP42-AtEFR-3×FLAG (SEQ ID NO: 62). These receptors typically contain a signal peptide (SP), an apoplastic ectodomain rich in Leucine-Rich Repeats (LRR domain), an apoplastic extra-juxtamembrane (eJM) domain, a transmembrane (TM) domain, and either a cytoplasmic carboxy-terminal extension (tail) or a kinase domain for the RLPs or RLKs, respectively.

[0013] FIG. 2 is a graphical representation of the calcium burst measured in corn protoplasts transiently transfected with 10 μg of ZmUbi::R-GECO1.2::rbcS (SEQ ID NO: 75) and 10 μg of either pUC19 (SEQ ID NO: 74) or the 2×35S+Ω promoter construct (SEQ ID NO: 72) operably linked to AtRLP23-3×FLAG coding sequence (SEQ ID NO: 13) which is operably linked to rbcS terminator (SEQ ID NO: 71). Fluorescence was measured in response to 1 μM PpNLP20 (AIMYSWYFPKDSPVTGLGHR, SEQ ID NO: 63); prepared by diluting a 100 μM stock solution with the protoplast incubation buffer). Each measurement was performed in 384-well multiplate using a 25 μL aliquot from a 120 μL solution containing 0.32×10⁶ corn cells transiently transfected. 12.5 μL of 3 μM PpNLP20 were then added before immediately monitoring the fluorescence of the samples with excitation 556 nm and emission 585 nm. Values are average and standard error (n=8).

[0014] FIG. 3 is a graphical representation of the calcium burst measured in corn protoplasts transiently transfected with 10 μg of ZmUbi::R-GECO1.2::rbcS (SEQ ID NO: 75) and 10 μg of either the AtRLP23-3×FLAG (SEQ ID NO: 13), AtRLP23-eJM(EEEE/ADQ−)-3×FLAG (SEQ ID NO: 45), AtRLP23-eJMAtRLP1-3×FLAG (SEQ ID NO: 49), AtRLP23-eJMAtRLP42-3×FLAG (SEQ ID NO: 57) or AtRLP23-eJMVe1-3×FLAG (SEQ ID NO: 53), all of which were operably linked to 2×35S+Ω promoter construct and the rbcS terminator. Fluorescence was measured in response to the protoplast incubation buffer or to 1 μM PpNLP20 (SEQ ID NO: 63); prepared by diluting a 100 μM stock solution with the protoplast incubation buffer). Each measurement was performed in 96-well multiplate using a 100 μL aliquot from a 120 μL solution containing 0.32×10⁶ corn cells transiently transfected. 50 μL of either buffer or 3 μM PpNLP20 were then added before immediately monitoring the fluorescence of the samples with excitation 556 nm and emission 585 nm. For each fluorescence measurement, the transient increase of fluorescence was measured over background determined as the average signal in presence of buffer. Total transient increase of fluorescence was measured for 40 minutes from the time of treatment. Values are average and standard error (n=8). Statistical significance by comparison with the total transient increase of fluorescence observed with AtRLP23-3×FLAG+1 μM PpNLP20 using one-way ANOVA test followed by Dunnett's post-test, n.s. non-significant, ***P<0.001.

[0015] FIG. 4 is a graphical representation of the calcium burst measured in corn protoplasts transiently transfected with 10 μg of ZmUbi::R-GECO1.2::rbcS (SEQ ID NO: 75) and 10 μg of either pUC19 (SEQ ID NO: 74) or the following AtRLP23 constructs: AtRLP23-3×FLAG (SEQ ID NO: 13), AtRLP23-OsXA21-3×FLAG (SEQ ID NO: 21), AtRLP23-AtEFR-3×FLAG (SEQ ID NO: 17), AtRLP23+TM-AtEFR-3×FLAG (SEQ ID NO: 33), AtRLP23-AtBAK1-3×FLAG (SEQ ID NO: 25), AtRLP23+TM-AtBAK1-3×FLAG (SEQ ID NO: 37), AtRLP23-AtSOBIR1-3×FLAG (SEQ ID NO: 29) or AtRLP23+TM-AtSOBIR1-3×FLAG (SEQ ID NO: 41). All of the AtRLP23 constructs were expressed under the control of an operably linked 2×35S+Ω promoter construct (SEQ ID NO: 72) and also contained an operably linked rbcS terminator (SEQ ID NO: 73). Fluorescence was measured in response to the protoplast incubation buffer or to 1 μM PpNLP20 (SEQ ID NO: 63); prepared by diluting a 100 μM stock solution with the protoplast incubation buffer). Each measurement was performed in 384-well multiplate using a 25 μL aliquot from a 120 μL solution containing 0.32×10⁶ corn cells transiently transfected. 12.5 μL of either buffer or 3 μM PpNLP20 were then added before immediately monitoring the fluorescence of the samples with excitation 556 nm and emission 585 nm. For each fluorescence measurement, the transient increase of fluorescence was measured over background determined as the average signal in presence of buffer. Total transient increase of fluorescence was measured for 40 minutes from the time of treatment. Values are average (n=8).

[0016] FIG. 5 is a graphical representation of the calcium burst measured in corn protoplasts transiently transfected with 10 μg of ZmUbi::Apoaequorin::rbcS (SEQ ID NO: 76) and 10 μg of a construct comprising AtRLP23-eJMAtRLP42-AtEFR-3×FLAG (SEQ ID NO: 61) expressed under the control of an operably linked 2×35S+Ω promoter construct (SEQ ID NO: 72) and also containing an operably linked rbcS terminator (SEQ ID NO: 73). Luminescence was measured in response to the protoplast incubation buffer or to 1 μM PpNLP20 (AIMYSWYFPKDSPVTGLGHR, SEQ ID NO: 63; prepared by diluting a 100 μM stock solution with the protoplast incubation buffer). Each measurement was performed in 96-well multiplate using a 100 μL aliquot from a 120 μL solution containing 0.32×10⁶ corn cells transiently transfected and incubated for 2 hours with 1 μM coelenterazine. 50 μL of 3 μM PpNLP20 were then added before immediately monitoring the luminescence of the samples. Values are average and standard error (n=8).

[0017] FIG. 6 is a graphical representation of the calcium burst measured in corn protoplasts transiently transfected with 10 μg of ZmUbi::Apoaequorin::rbcS (SEQ ID NO: 76) and 10 of one of the following constructs: AtRLP23-eJMAtRLP42-3×FLAG (SEQ ID NO: 57) or AtRLP23-eJMAtRLP42-AtEFR-3×FLAG (SEQ ID NO: 61). Both constructs were expressed under the control of an operably linked 2×35S+Ω promoter construct (SEQ ID NO: 72) and also contained an operably linked rbcS terminator (SEQ ID NO: 73). Luminescence was measured in response to the protoplast incubation buffer or to 1 μM PpNLP20 (SEQ ID NO: 63), CgNLP24b (SEQ ID NO: 64), FgNLP24c (SEQ ID NO: 65), FvNLP24a (SEQ ID NO: 66) or SmNLP24 (SEQ ID NO: 67). Each measurement was performed in 96-well multiplate using a 100 μL aliquot from a 120 μL solution containing 0.32×10⁶ corn cells transiently transfected and incubated for 2 hours with 1 μM coelenterazine. 50 μL of buffer or 3 μM of either PpNLP20, CgNLP24b, FgNLP24c, FvNLP24a or SmNLP24 solutions are then added before immediately monitoring the luminescence of the samples. Total transient increase of luminescence was measured for 40 minutes from the time of treatment. Values are average and standard error (n=8). Statistical significance by comparison with the corresponding buffer treatments using one-way ANOVA test followed by Dunnett's post-test, *P<0.05, **P<0.01, ***P<0.001.

[0018] FIG. 7 is a graphical representation of the calcium burst measured in corn protoplasts transiently transfected with 10 μg of ZmUbi::Apoaequorin::rbcS (SEQ ID NO: 76) and 10 of AtRLP23-eJMAtRLP42-AtEFR-3×FLAG (SEQ ID NO: 61) expressed under the control of an operably linked 2×35S+Ω promoter construct (SEQ ID NO: 72) and also containing an operably linked rbcS terminator (SEQ ID NO: 73). Luminescence was measured in response to the protoplast incubation buffer or to 1 μM PpNLP20 (SEQ ID NO: 63), SmNLP24 (SEQ ID NO: 67), AfNLP24a (SEQ ID NO: 68), ApNLP24a (SEQ ID NO: 71), AfNLP24b (SEQ ID NO: 69) or AfNLP24c (SEQ ID NO: 70). Each measurement was performed in 96-well multiplate using a 100 μL aliquot from a 120 μL solution containing 0.32×10⁶ corn cells transiently transfected and incubated for 2 hours with 1 μM coelenterazine. 50 μL of buffer or 3 μM of either PpNLP20, SmNLP24, AfNLP24a, ApNLP24a, AfNLP24b or AfNLP24c solutions are then added before immediately monitoring the luminescence of the samples. Total transient increase of luminescence was measured for 40 minutes from the time of treatment. Values are average and standard error (n=8). Statistical significance by comparison with the corresponding buffer treatments using one-way ANOVA test followed by Dunnett's post-test, ***P<0.001.

[0019] FIG. 8 is a graphical representation of the calcium burst measured in corn protoplasts transiently transfected with 10 μg of one of the following constructs: AtRLP23-eJMAtRLP42-AtEFR-3×FLAG (SEQ ID NO: 61) or AtRLP23-AtPEPR1-3×FLAG (SEQ ID NO: 572). Both constructs were expressed under the control of an operably linked 2×35S+Ω promoter construct (SEQ ID NO: 72) and an operably linked rbcS terminator (SEQ ID NO: 73). Luminescence (RLU) was measured in response to the protoplast incubation buffer or to SmNLP24 (SEQ ID NO: 67), CgNLP24b (SEQ ID NO: 64), FgNLP24c (SEQ ID NO: 65), or FvNLP24a (SEQ ID NO: 66). Each measurement was performed in 96-well multiplate using a 100 μL aliquot from a 120 μL solution containing 0.32×10⁶ corn protoplasts transiently transfected and incubated for 2 hours with 1 μM coelenterazine. 50 μL of buffer or 3 μM of either SmNLP24, CgNLP24b, FgNLP24c or FvNLP24a solutions were then added before immediately monitoring the luminescence of the samples. Total transient increase of luminescence (RLU) was measured for 40 minutes from the time of treatment. Values are average and standard error (n=4). Statistical significance between buffer and peptide treatments was tested using ANOVA post-hoc pairwise comparisons performed with Bonferroni. All pairs showed statistically significant difference of p<0.001, except for AtRLP2-AtPEPR1-3×FLAG treated with FgNLP24a, where p-value <0.001.

[0020] FIG. 9 is a graphical representation is the results of a Diplodia stalk rot assay using greenhouse-grown, transgenic corn plants expressing an AtRLP23-eJMAtRLP42-AtEFR construct which comprises the ectodomain of AtRLP23, the eJM domain of AtRLP42, the TM and cytoplasmic domains of AtEFR. “Events 1-10” are ten individual transgenic events produced from the transformation of corn with the construct. “Transformation germplasm” represents untransformed, control plants. The errors bars indicate standard error of the difference.

[0021] FIG. 10 is a graphical representation is the results of a Diplodia stalk rot assay using greenhouse-grown, transgenic corn plants expressing an AtRLP23-eJMAtRLP42-AtRLP23-TM+C-term construct which comprises the ectodomain of AtRLP23, the eJM domain of AtRLP42, and the TM and the cytoplasmic domain of AtRLP23. “Events 1-9” are nine individual transgenic events produced from the transformation of corn with the construct. “Transformation germplasm” represents untransformed, control plants. The errors bars indicate standard error of the difference.

[0022] FIG. 11 is a graphical representation is the results of a Diplodia stalk rot assay using greenhouse-grown, transgenic corn plants expressing an AtRLP23-eJMAtRLP42-TMAtRLP23-AtSOBIR1 construct which comprises the ectodomain of AtRLP23, the eJM domain of AtRLP42, the TM domain of AtRLP23, and the cytoplasmic domain of AtSOBIR1. “Events 1-9” are nine individual transgenic events produced from the transformation of corn with the construct. “Transformation germplasm” represents untransformed, control plants. The errors bars indicate standard error of the difference.

### SEQUENCE LISTING

[0023] The nucleotide and amino acid sequences listed in the accompanying sequence listing are shown using standard letter abbreviations for nucleotide bases, and three-letter code for amino acids. The nucleotide sequences follow the standard convention of beginning at the 5′ end of the sequence and proceeding forward (i.e., from left to right in each line) to the 3′ end. Only one strand of each nucleotide sequence is shown, but the complementary strand is understood to be included by any reference to the displayed strand. The amino acid sequences follow the standard convention of beginning at the amino terminus of the sequence and proceeding forward (i.e., from left to right in each line) to the carboxy terminus.

[0024] SEQ ID NO: 1 sets forth the nucleotide sequence of the coding region of AtRLP23 from Arabidopsis thaliana. If desired, a stop codon (e.g. TAA, TAG, or TGA) can be operably linked to the 3′ end of a nucleic acid molecule comprising SEQ ID NO: 1. It is noted that the native stop codon of AtRLP23 is TAG.

[0025] SEQ ID NO: 2 sets forth the amino acid sequence of AtRLP23, the protein encoded by AtRLP23.

[0026] SEQ ID NO: 3 sets forth the nucleotide sequence of the coding region of AtRLP42 from Arabidopsis thaliana. If desired, a stop codon (e.g. TAA, TAG, or TGA) can be operably linked to the 3′ end of a nucleic acid molecule comprising SEQ ID NO: 3. It is noted that the native stop codon of AtRLP23 is TAA.

[0027] SEQ ID NO: 4 sets forth the amino acid sequence of AtRLP42, the protein encoded by AtRLP42.

[0028] SEQ ID NO: 5 sets forth the nucleotide sequence of the coding region of AtEFR from Arabidopsis thaliana. If desired, a stop codon (e.g. TAA, TAG, or TGA) can be operably linked to the 3′ end of a nucleic acid molecule comprising SEQ ID NO: 5. It is noted that the native stop codon of AtEFR is TAG.

[0029] SEQ ID NO: 6 sets forth the amino acid sequence of AtEFR, the protein encoded by AtEFR.

[0030] SEQ ID NO: 7 sets forth the nucleotide sequence of the coding region of AtSOBIR1 from Arabidopsis thaliana. If desired, a stop codon (e.g. TAA, TAG, or TGA) can be operably linked to the 3′ end of a nucleic acid molecule comprising SEQ ID NO: 7. It is noted that the native stop codon of AtSOBIR1 is TAG.

[0031] SEQ ID NO: 8 sets forth the amino acid sequence of AtSOBIR1, the protein encoded by AtSOBIR1.

[0032] SEQ ID NO: 9 sets forth the nucleotide sequence of the coding region of SlVe1 from Solanum lycopersicum. If desired, a stop codon (e.g. TAA, TAG, or TGA) can be operably linked to the 3′ end of a nucleic acid molecule comprising SEQ ID NO: 9. It is noted that the native stop codon of SlVe1 is TGA.

[0033] SEQ ID NO: 10 sets forth the amino acid sequence of SlVe1, the protein encoded by SlVe1.

[0034] SEQ ID NO: 11 sets forth the nucleotide sequence of the coding region of OsXA21 from Oryza sativa. If desired, a stop codon (e.g. TAA, TAG, or TGA) can be operably linked to the 3′ end of a nucleic acid molecule comprising SEQ ID NO: 11. It is noted that the native stop codon of OsXA21 is TGA.

[0035] SEQ ID NO: 12 sets forth the amino acid sequence of OsXA21, the protein encoded by OsXA21.

[0036] SEQ ID NO: 13 sets forth the nucleotide sequence of the AtRLP23-3×FLAG polynucleotide construct. The construct comprises a first nucleotide sequence encoding AtRLP23 (nucleotides 1-2670) which includes the apoplastic domain, the extra-juxtamembrane (eJM) domain, the transmembrane (TM) domain and the cytoplasmic domain, operably linked a second nucleotide sequence encoding a linking amino acid (nucleotides 2671-2673) which is operably linked to a nucleotide sequence encoding the 3×FLAG peptide (nucleotides 2674-2754). If desired, a stop codon (e.g. TAA, TAG, or TGA) can be operably linked to the 3′ end of a nucleic acid molecule comprising SEQ ID NO: 13. It is noted that in the Examples below, the stop codon TGA was used with this construct.

[0037] SEQ ID NO: 14 sets forth the amino acid sequence of AtRLP23-3×FLAG protein encoded by SEQ ID NO: 13. The AtRLP23-3×FLAG protein comprises AtRLP23 (amino acids 1-890) which includes the apoplastic, eJM, TM, cytoplasmic domains operably linked to a linking amino acid (amino acid 891) which is operably linked to the 3×FLAG peptide (amino acids 892-918).

[0038] SEQ ID NO: 15 sets forth the nucleotide sequence of the AtRLP23-AtEFR polynucleotide construct. The construct comprises a first nucleotide sequence encoding the apoplastic and eJM domains of AtRLP23 (nucleotides 1-2550) operably linked to a second nucleotide sequence comprising a coding sequence for the AtEFR TM domain and the first of two parts of the AtEFR cytoplasmic domain (nucleotides 2551-3304), an AtEFR intron (nucleotides 3305-3391), and the coding sequence of the second part of AtEFR cytoplasmic domain (nucleotides 3392-3783). If desired, a stop codon (e.g. TAA, TAG, or TGA) can be operably linked to the 3′ end of a nucleic acid molecule comprising SEQ ID NO: 15.

[0039] SEQ ID NO: 16 sets forth the amino acid sequence of AtRLP23-AtEFR protein encoded by SEQ ID NO: 15. The AtRLP23-AtEFR protein comprises a first polypeptide comprising the AtRLP23 apoplastic and eJM domains (amino acids 1-850) operably linked to a second polypeptide comprising the AtEFR TM and cytoplasmic domains (amino acids 851-1232).

[0040] SEQ ID NO: 17 sets forth the nucleotide sequence of the AtRLP23-AtEFR-3×FLAG polynucleotide construct. The construct comprises a first nucleotide sequence encoding the apoplastic and eJM domains of AtRLP23 (nucleotides 1-2550), operably linked to a second nucleotide sequence comprising a coding sequence for the AtEFR TM domain and the first of two parts of the AtEFR cytoplasmic domain (nucleotides 2551-3304), an AtEFR intron (nucleotides 3305-3391), and the coding sequence of the second part of AtEFR cytoplasmic domain (nucleotides 3392-3783), operably linked to third nucleotide sequence encoding a linker (nucleotides 3784-3789), operably linked to a fourth nucleotide sequence encoding the 3×FLAG peptide (nucleotides 3790-3870). If desired, a stop codon (e.g. TAA, TAG, or TGA) can be operably linked to the 3′ end of a nucleic acid molecule comprising SEQ ID NO: 17. It is noted that in the Examples below, the stop codon TGA was used with this construct.

[0041] SEQ ID NO: 18 sets forth the amino acid sequence of AtRLP23-AtEFR-3×FLAG protein encoded by SEQ ID NO: 17. The AtRLP23-AtEFR-3×FLAG protein comprises a first polypeptide comprising the AtRLP23 apoplastic and eJM domains (amino acids 1-850), operably linked to a second polypeptide comprising the AtEFR TM and cytoplasmic domains (amino acids 851-1232), operably linked to a linker dipeptide (amino acids 1233-1234), operably linked to the 3×FLAG peptide (amino acids 1235-1261).

[0042] SEQ ID NO: 19 sets forth the nucleotide sequence of the AtRLP23-OsXA21 polynucleotide construct. The construct comprises a first nucleotide sequence encoding the apoplastic and eJM domains of AtRLP23 (nucleotides 1-2550) operably linked to a second nucleotide sequence encoding the OsXA21 TM and cytoplasmic domains (nucleotides 2551-3675). If desired, a stop codon (e.g. TAA, TAG, or TGA) can be operably linked to the 3′ end of a nucleic acid molecule comprising SEQ ID NO: 19.

[0043] SEQ ID NO: 20 sets forth the amino acid sequence of AtRLP23-OsXA21 protein encoded by SEQ ID NO: 19. The AtRLP23-OsXA21 protein comprises a first polypeptide comprising the AtRLP23 apoplastic and eJM domains (amino acids 1-850) operably linked to a second polypeptide comprising the OsXA21 TM and cytoplasmic domains (amino acids 851-1225).

[0044] SEQ ID NO: 21 sets forth the nucleotide sequence of the AtRLP23-OsXA21-3×FLAG polynucleotide construct. The construct comprises a first nucleotide sequence encoding the apoplastic and eJM domains of AtRLP23 (nucleotides 1-2550), operably linked to a second nucleotide sequence encoding the OsXA21 TM and cytoplasmic domains (nucleotides 2551-3675), operably linked to third nucleotide sequence encoding a linking amino acid (nucleotides 3676-3678), operably linked to a fourth nucleotide sequence encoding the 3×FLAG peptide (nucleotides 3679-3762). If desired, a stop codon (e.g. TAA, TAG, or TGA) can be operably linked to the 3′ end of a nucleic acid molecule comprising SEQ ID NO: 21. It is noted that in the Examples below, the stop codon TGA was used with this construct.

[0045] SEQ ID NO: 22 sets forth the amino acid sequence of AtRLP23-OsXA21-3×FLAG protein encoded by SEQ ID NO: 21. The AtRLP23-OsXA21-3×FLAG protein comprises a first polypeptide comprising the AtRLP23 apoplastic and eJM domains (amino acids 1-850), operably linked to a second polypeptide comprising the OsXA21 TM and cytoplasmic domains (amino acids 851-1225), operably linked to a linking amino acid (amino acid 1226), operably linked to the 3×FLAG peptide (amino acids 1227-1253).

[0046] SEQ ID NO: 23 sets forth the nucleotide sequence of the AtRLP23-AtBAK1 polynucleotide construct. The construct comprises a first nucleotide sequence encoding the apoplastic and eJM domains of AtRLP23 (nucleotides 1-2550) operably linked to a second nucleotide sequence comprising a coding sequence for the AtBAK1 TM domain and the first of four parts of the AtBAK1 cytoplasmic domain (nucleotides 2551-2671), a first AtBAK1 intron (nucleotides 2672-2748), the coding sequence of the second part of AtBAK1 cytoplasmic domain (nucleotides 2749-3090), a second AtBAK1 intron (nucleotides 3091-3187), the coding sequence of the third part of AtBAK1 cytoplasmic domain (nucleotides 3188-3582), a third AtBAK1 intron (nucleotides 3583-3663), the coding sequence of the fourth part of AtBAK1 cytoplasmic domain (nucleotides 3664-3984). If desired, a stop codon (e.g. TAA, TAG, or TGA) can be operably linked to the 3′ end of a nucleic acid molecule comprising SEQ ID NO: 23.

[0047] SEQ ID NO: 24 sets forth the amino acid sequence of AtRLP23-AtBAK1 protein encoded by SEQ ID NO: 23. The AtRLP23-AtBAK1 protein comprises a first polypeptide comprising the AtRLP23 apoplastic and eJM domains (amino acids 1-850) operably linked to a second polypeptide comprising the AtBAK1 TM and cytoplasmic domains (amino acids 851-1242).

[0048] SEQ ID NO: 25 sets forth the nucleotide sequence of the AtRLP23-AtBAK1-3×FLAG polynucleotide construct. The construct comprises a first nucleotide sequence encoding the apoplastic and eJM domains of AtRLP23 (nucleotides 1-2550) operably linked to a second nucleotide sequence comprising a coding sequence for the AtBAK1 TM domain and the first of four parts of the AtBAK1 cytoplasmic domain (nucleotides 2551-2671), a first AtBAK1 intron (nucleotides 2672-2748), the coding sequence of the second part of AtBAK1 cytoplasmic domain (nucleotides 2749-3090), a second AtBAK1 intron (nucleotides 3091-3187), the coding sequence of the third part of AtBAK1 cytoplasmic domain (nucleotides 3188-3582), a third AtBAK1 intron (nucleotides 3583-3663), the coding sequence of the fourth part of AtBAK1 cytoplasmic domain (nucleotides 3664-3984), operably linked to third nucleotide sequence encoding a linking amino acid (nucleotides 3985-3987), operably linked to a fourth nucleotide sequence encoding the 3×FLAG peptide (nucleotides 3988-4068). If desired, a stop codon (e.g. TAA, TAG, or TGA) can be operably linked to the 3′ end of a nucleic acid molecule comprising SEQ ID NO: 25. It is noted that in the Examples below, the stop codon TGA was used with this construct.

[0049] SEQ ID NO: 26 sets forth the amino acid sequence AtRLP23-AtBAK1-3×FLAG protein encoded by SEQ ID NO: 25. The AtRLP23-AtBAK1-3×FLAG protein comprises a first polypeptide comprising the AtRLP23 apoplastic and eJM domains (amino acids 1-850), operably linked to a second polypeptide comprising the AtBAK1 TM and cytoplasmic domains (amino acids 851-1243), operably linked to a linking amino acid (amino acid 1244), operably linked to the 3×FLAG peptide (amino acids 1245-1271).

[0050] SEQ ID NO: 27 sets forth the nucleotide sequence of the AtRLP23-AtSOBIR1 polynucleotide construct. The construct comprises a first nucleotide sequence encoding the apoplastic and eJM domains of AtRLP23 (nucleotides 1-2550) operably linked to a second nucleotide sequence encoding the AtSOBIR1 TM and cytoplasmic domains (nucleotides 2551-3624). If desired, a stop codon (e.g. TAA, TAG, or TGA) can be operably linked to the 3′ end of a nucleic acid molecule comprising SEQ ID NO: 27.

[0051] SEQ ID NO: 28 sets forth the amino acid sequence of AtRLP23-AtSOBIR1 protein encoded by SEQ ID NO: 27. The AtRLP23-AtSOBIR1 protein comprises a first polypeptide comprising the AtRLP23 apoplastic and eJM domains (amino acids 1-850) operably linked to a second polypeptide comprising the AtSOBIR1 TM and cytoplasmic domains (amino acids 851-1208).

[0052] SEQ ID NO: 29 sets forth the nucleotide sequence of the AtRLP23-AtSOBIR1-3×FLAG polynucleotide construct. The construct comprises a first nucleotide sequence encoding the apoplastic and eJM domains of AtRLP23 (nucleotides 1-2550), operably linked to a second nucleotide sequence encoding the AtSOBIR1 TM and cytoplasmic domains (nucleotides 2551-3624), operably linked to third nucleotide sequence encoding a linking amino acid (nucleotides 3625-3627), operably linked to a fourth nucleotide sequence encoding the 3×FLAG peptide (nucleotides 3628-3708). If desired, a stop codon (e.g. TAA, TAG, or TGA) can be operably linked to the 3′ end of a nucleic acid molecule comprising SEQ ID NO: 29. It is noted that in the Examples below, the stop codon TGA was used with this construct.

[0053] SEQ ID NO: 30 sets forth the amino acid sequence of AtRLP23-AtSOBIR1-3×FLAG protein encoded by SEQ ID NO: 29. The AtRLP23-AtSOBIR1-3×FLAG protein comprises a first polypeptide comprising the AtRLP23 apoplastic and eJM domains (amino acids 1-850), operably linked to a second polypeptide comprising the AtSOBIR1 TM and cytoplasmic domains (amino acids 851-1208), operably linked to a linking amino acid (amino acid 1209), operably linked to the 3×FLAG peptide (amino acids 1210-1236).

[0054] SEQ ID NO: 31 sets forth the nucleotide sequence of the AtRLP23+TM-AtEFR polynucleotide construct. The construct comprises a first nucleotide sequence encoding the apoplastic, eJM, and TM domains of AtRLP23 (nucleotides 1-2619) operably linked to a second nucleotide sequence comprising a coding sequence for first of two parts of the AtEFR cytoplasmic domain (nucleotides 2620-3298), an AtEFR intron (nucleotides 3299-3385), and the coding sequence of the second part of AtEFR cytoplasmic domain (nucleotides 3386-3777). If desired, a stop codon (e.g. TAA, TAG, or TGA) can be operably linked to the 3′ end of a nucleic acid molecule comprising SEQ ID NO: 31.

[0055] SEQ ID NO: 32 sets forth the amino acid sequence of AtRLP23+TM-AtEFR protein encoded by SEQ ID NO: 31. The AtRLP23+TM-AtEFR protein comprises a first polypeptide comprising the AtRLP23 apoplastic, eJM and TM domains (amino acids 1-873) operably linked to a second polypeptide comprising the AtEFR cytoplasmic domain (amino acids 874-1230).

[0056] SEQ ID NO: 33 sets forth the nucleotide sequence of the AtRLP23+TM-AtEFR-3×FLAG polynucleotide construct. The construct comprises a first nucleotide sequence encoding the apoplastic, eJM, and TM domains of AtRLP23 (nucleotides 1-2619), operably linked to a second nucleotide sequence comprising a coding sequence for first of two parts of the AtEFR cytoplasmic domain (nucleotides 2620-3298), an AtEFR intron (nucleotides 3299-3385), and the coding sequence of the second part of AtEFR cytoplasmic domain (nucleotides 3386-3777), operably linked to third nucleotide sequence encoding a linker (nucleotides 3778-3783), operably linked to a fourth nucleotide sequence encoding the 3×FLAG peptide (nucleotides 3784-3864). If desired, a stop codon (e.g. TAA, TAG, or TGA) can be operably linked to the 3′ end of a nucleic acid molecule comprising SEQ ID NO: 33. It is noted that in the Examples below, the stop codon TGA was used with this construct.

[0057] SEQ ID NO: 34 sets forth the amino acid sequence of AtRLP23+TM-AtEFR-3×FLAG protein encoded by SEQ ID NO: 33. The AtRLP23+TM-AtEFR-3×FLAG protein comprises a first polypeptide comprising the AtRLP23 apoplastic, eJM, and TM domains (amino acids 1-873), operably linked to a second polypeptide comprising the AtEFR cytoplasmic domain (amino acids 874-1230), operably linked to a linker dipeptide (amino acids 1231-1232), operably linked to the 3×FLAG peptide (amino acids 1233-1259).

[0058] SEQ ID NO: 35 sets forth the nucleotide sequence of the AtRLP23+TM-AtBAK1 polynucleotide construct. The construct comprises a first nucleotide sequence encoding the apoplastic, eJM, and TM domains of AtRLP23 (nucleotides 1-2619) operably linked to a second nucleotide sequence comprising a coding sequence for the first of four parts of the AtBAK1 cytoplasmic domain (nucleotides 2620-2659), a first AtBAK1 intron (nucleotides 2660-2736), the coding sequence of the second part of AtBAK1 cytoplasmic domain (nucleotides 2737-3078), a second AtBAK1 intron (nucleotides 3079-3175), the coding sequence of the third part of AtBAK1 cytoplasmic domain (nucleotides 3176-3570), a third AtBAK1 intron (nucleotides 3571-3651), the coding sequence of the fourth part of AtBAK1 cytoplasmic domain (nucleotides 3652-3972). If desired, a stop codon (e.g. TAA, TAG, or TGA) can be operably linked to the 3′ end of a nucleic acid molecule comprising SEQ ID NO: 35.

[0059] SEQ ID NO: 36 sets forth the amino acid sequence of AtRLP23+TM-AtBAK1 protein encoded by SEQ ID NO: 35. The AtRLP23+TM-AtBAK1 protein comprises a first polypeptide comprising the AtRLP23 apoplastic, eJM, and TM domains (amino acids 1-873) operably linked to a second polypeptide comprising the AtBAK1 cytoplasmic domain (amino acids 874-1239).

[0060] SEQ ID NO: 37 sets forth the nucleotide sequence of the AtRLP23+TM-AtBAK1-3×FLAG polynucleotide construct. The construct comprises a first nucleotide sequence encoding the apoplastic, eJM, and TM domains of AtRLP23 (nucleotides 1-2619) operably linked to a second nucleotide sequence comprising a coding sequence for the first of four parts of the AtBAK1 cytoplasmic domain (nucleotides 2620-2659), a first AtBAK1 intron (nucleotides 2660-2736), the coding sequence of the second part of AtBAK1 cytoplasmic domain (nucleotides 2737-3078), a second AtBAK1 intron (nucleotides 3079-3175), the coding sequence of the third part of AtBAK1 cytoplasmic domain (nucleotides 3176-3570), a third AtBAK1 intron (nucleotides 3571-3651), the coding sequence of the fourth part of AtBAK1 cytoplasmic domain (nucleotides 3652-3972), operably linked to third nucleotide sequence encoding a linking amino acid (nucleotides 3973-3975), operably linked to a fourth nucleotide sequence encoding the 3×FLAG peptide (nucleotides 3976-4056). If desired, a stop codon (e.g. TAA, TAG, or TGA) can be operably linked to the 3′ end of a nucleic acid molecule comprising SEQ ID NO: 37. It is noted that in the Examples below, the stop codon TGA was used with this construct.

[0061] SEQ ID NO: 38 sets forth the amino acid sequence AtRLP23+TM-AtBAK1-3×FLAG protein encoded by SEQ ID NO: 37. The AtRLP23+TM-AtBAK1-3×FLAG protein comprises a first polypeptide comprising the AtRLP23 apoplastic, eJM, and TM domains (amino acids 1-873), operably linked to a second polypeptide comprising the AtBAK1 cytoplasmic domain (amino acids 874-1239), operably linked to a linking amino acid (amino acid 1240), operably linked to the 3×FLAG peptide (amino acids 1241-1267).

[0062] SEQ ID NO: 39 sets forth the nucleotide sequence of the AtRLP23+TM-AtSOBIR1 polynucleotide construct. The construct comprises a first nucleotide sequence encoding the apoplastic, eJM, and TM domains of AtRLP23 (nucleotides 1-2619) operably linked to a second nucleotide sequence encoding the AtSOBIR1 cytoplasmic domain (nucleotides 2620-3615). If desired, a stop codon (e.g. TAA, TAG, or TGA) can be operably linked to the 3′ end of a nucleic acid molecule comprising SEQ ID NO: 39.

[0063] SEQ ID NO: 40 sets forth the amino acid sequence of AtRLP23+TM-AtSOBIR1 protein encoded by SEQ ID NO: 39. The AtRLP23+TM-AtSOBIR1 protein comprises a first polypeptide comprising the AtRLP23 apoplastic, eJM, and TM domains (amino acids 1-873) operably linked to a second polypeptide comprising the AtSOBIR1 cytoplasmic domain (amino acids 874-1205).

[0064] SEQ ID NO: 41 sets forth the nucleotide sequence of the AtRLP23+TM-AtSOBIR1-3×FLAG polynucleotide construct. The construct comprises a first nucleotide sequence encoding the apoplastic, eJM, and TM domains of AtRLP23 (nucleotides 1-2619) operably linked to a second nucleotide sequence encoding the AtSOBIR1 cytoplasmic domain (nucleotides 2620-3615), operably linked to third nucleotide sequence encoding a linking amino acid (nucleotides 3616-3618), operably linked to a fourth nucleotide sequence encoding the 3×FLAG peptide (nucleotides 3619-3799). If desired, a stop codon (e.g. TAA, TAG, or TGA) can be operably linked to the 3′ end of a nucleic acid molecule comprising SEQ ID NO: 41. It is noted that in the Examples below, the stop codon TGA was used with this construct.

[0065] SEQ ID NO: 42 sets forth the amino acid sequence of AtRLP23+TM-AtSOBIR1-3×FLAG protein encoded by SEQ ID NO: 41. The AtRLP23+TM-AtSOBIR1-3×FLAG protein comprises a first polypeptide comprising the AtRLP23 apoplastic, eJM, and TM domains (amino acids 1-873) operably linked to a second polypeptide comprising the AtSOBIR1 cytoplasmic domain (amino acids 874-1205), operably linked to a linking amino acid (amino acid 1206), operably linked to the 3×FLAG peptide (amino acids 1207-1233).

[0066] SEQ ID NO: 43 sets forth the nucleotide sequence of the AtRLP23-eJM(EEEE/ADQ−) polynucleotide construct. The construct comprises in operable linkage nucleotide sequences encoding the AtRLP23 apoplastic domain, a modified AtRLP23 eJM domain, the AtRLP23 TM domain, and the AtRLP23 cytoplasmic domain. Relative to the amino acid sequence of the wild-type AtRLP23 eJM domain, the modified AtRLP23 eJM domain comprises the substitution of D for E at amino acid 841 of wild-type AtRLP23, Q for E at amino acid 843, and EV for EEV at amino acids 844-846. If desired, a stop codon (e.g. TAA, TAG, or TGA) can be operably linked to the 3′ end of a nucleic acid molecule comprising SEQ ID NO: 43.

[0067] SEQ ID NO: 44 sets forth the amino acid sequence of AtRLP23-eJM(EEEE/ADQ−) protein encoded by SEQ ID NO: 43. The AtRLP23-eJM(EEEE/ADQ−) protein comprises the AtRLP23 apoplastic domain, a modified AtRLP23 eJM domain, the AtRLP23 TM domain, and the AtRLP23 cytoplasmic domain. Relative to the amino acid sequence of the wild-type AtRLP23 eJM domain, the modified AtRLP23 eJM domain comprises the substitution of D for E at amino acid 841 of wild-type AtRLP23, Q for E at amino acid 843, and EV for EEV at amino acids 844-846.

[0068] SEQ ID NO: 45 sets forth the nucleotide sequence of the AtRLP23-eJM(EEEE/ADQ−)-3×FLAG polynucleotide construct. The construct comprises the nucleotide sequence of SEQ ID NO: 43 (nucleotides 1-2667), operably linked to a nucleotide sequence encoding a linking amino acid (nucleotides 2668-2670), operably linked to a nucleotide sequence encoding the 3×FLAG peptide (nucleotides 2671-2751). If desired, a stop codon (e.g. TAA, TAG, or TGA) can be operably linked to the 3′ end of a nucleic acid molecule comprising SEQ ID NO: 45. It is noted that in the Examples below, the stop codon TGA was used with this construct.

[0069] SEQ ID NO: 46 sets forth the amino acid sequence of AtRLP23-eJM(EEEE/ADQ−)-3×FLAG protein encoded by SEQ ID NO: 45. The AtRLP23-eJM(EEEE/ADQ−)-3×FLAG protein comprises the amino acid sequence set forth in SEQ ID NO: 44 (amino acids 1-889), operably linked to a linking amino acid (amino acid 890), operably linked to the 3×FLAG peptide (amino acids 891-917).

[0070] SEQ ID NO: 47 sets forth the nucleotide sequence of the AtRLP23-eJMAtRLP1 polynucleotide construct. The construct comprises in operable linkage nucleotide sequences encoding the AtRLP23 apoplastic domain (nucleotides 1-2496), the AtRLP1 eJM domain (nucleotides 2497-2544), the AtRLP23 TM and cytoplasmic domains (nucleotides 2545-2664). If desired, a stop codon (e.g. TAA, TAG, or TGA) can be operably linked to the 3′ end of a nucleic acid molecule comprising SEQ ID NO: 47.

[0071] SEQ ID NO: 48 sets forth the amino acid sequence of AtRLP23-eJMAtRLP1 protein encoded by SEQ ID NO: 47. The AtRLP23-eJMAtRLP1 protein comprises the AtRLP23 apoplastic domain (amino acids 1-832), the AtRLP1 eJM domain (amino acids 833-848), and the AtRLP23 TM and cytoplasmic domains (amino acids 849-888).

[0072] SEQ ID NO: 49 sets forth the nucleotide sequence of the AtRLP23-eJMAtRLP1-3×FLAG polynucleotide construct. The construct comprises the nucleotide sequence of SEQ ID NO: 47 (nucleotides 1-2664), operably linked to a nucleotide sequence encoding a linking amino acid (nucleotides 2665-2667), operably linked to a nucleotide sequence encoding the 3×FLAG peptide (nucleotides 2668-2748). If desired, a stop codon (e.g. TAA, TAG, or TGA) can be operably linked to the 3′ end of a nucleic acid molecule comprising SEQ ID NO: 49. It is noted that in the Examples below, the stop codon TGA was used with this construct.

[0073] SEQ ID NO: 50 sets forth the amino acid sequence of AtRLP23-eJMAtRLP1-3×FLAG protein encoded by SEQ ID NO: 49. The AtRLP23-eJMAtRLP1-3×FLAG protein comprises the amino acid sequence set forth in SEQ ID NO: 48 (amino acids 1-888), operably linked to a linking amino acid (amino acid 889), operably linked to the 3×FLAG peptide (amino acids 890-916).

[0074] SEQ ID NO: 51 sets forth the nucleotide sequence of the AtRLP23-eJMVe1 polynucleotide construct. The construct comprises in operable linkage nucleotide sequences encoding the AtRLP23 apoplastic domain (nucleotides 1-2496), the SlVe1 eJM domain (nucleotides 2497-2547), the AtRLP23 TM and cytoplasmic domains (nucleotides 2548-2667). If desired, a stop codon (e.g. TAA, TAG, or TGA) can be operably linked to the 3′ end of a nucleic acid molecule comprising SEQ ID NO: 51.

[0075] SEQ ID NO: 52 sets forth the amino acid sequence of AtRLP23-eJMVe1 protein encoded by SEQ ID NO: 51. The AtRLP23-eJMVe1 protein comprises the AtRLP23 apoplastic domain (amino acids 1-832), the SlVe1 eJM domain (amino acids 833-849), and the AtRLP23 TM and cytoplasmic domains (amino acids 850-889).

[0076] SEQ ID NO: 53 sets forth the nucleotide sequence of the AtRLP23-eJMVe1-3×FLAG polynucleotide construct. The construct comprises the nucleotide sequence of SEQ ID NO: 51 (nucleotides 1-2667), operably linked to a nucleotide sequence encoding a linking amino acid (nucleotides 2668-2670), operably linked to a nucleotide sequence encoding the 3×FLAG peptide (nucleotides 2671-2751). If desired, a stop codon (e.g. TAA, TAG, or TGA) can be operably linked to the 3′ end of a nucleic acid molecule comprising SEQ ID NO: 53. It is noted that in the Examples below, the stop codon TGA was used with this construct.

[0077] SEQ ID NO: 54 sets forth the amino acid sequence of AtRLP23-eJMVe1-3×FLAG protein encoded by SEQ ID NO: 53. The AtRLP23-eJMVe1-3×FLAG protein comprises the amino acid sequence set forth in SEQ ID NO: 52 (amino acids 1-889), operably linked to a linking amino acid (amino acid 890), operably linked to the 3×FLAG peptide (amino acids 891-917).

[0078] SEQ ID NO: 55 sets forth the nucleotide sequence of the AtRLP23-eJMAtRLP42 polynucleotide construct. The construct comprises in operable linkage nucleotide sequences encoding the AtRLP23 apoplastic domain (nucleotides 1-2496), the AtRLP42 eJM domain (nucleotides 2497-2544), the AtRLP23 TM and cytoplasmic domains (nucleotides 2545-2664). If desired, a stop codon (e.g. TAA, TAG, or TGA) can be operably linked to the 3′ end of a nucleic acid molecule comprising SEQ ID NO: 55.

[0079] SEQ ID NO: 56 sets forth the amino acid sequence of AtRLP23-eJMAtRLP42 protein encoded by SEQ ID NO: 55. The AtRLP23-eJMAtRLP42 protein comprises the AtRLP23 apoplastic domain (amino acids 1-832), the AtRLP42 eJM domain (amino acids 833-848), and the AtRLP23 TM and cytoplasmic domains (amino acids 849-888).

[0080] SEQ ID NO: 57 sets forth the nucleotide sequence of the AtRLP23-eJMAtRLP42-3×FLAG polynucleotide construct. The construct comprises the nucleotide sequence of SEQ ID NO: 55 (nucleotides 1-2664), operably linked to a nucleotide sequence encoding a linking amino acid (nucleotides 2665-2667), operably linked to a nucleotide sequence encoding the 3×FLAG peptide (nucleotides 2668-2748). If desired, a stop codon (e.g. TAA, TAG, or TGA) can be operably linked to the 3′ end of a nucleic acid molecule comprising SEQ ID NO: 57. It is noted that in the Examples below, the stop codon TGA was used with this construct.

[0081] SEQ ID NO: 58 sets forth the amino acid sequence of AtRLP23-eJMAtRLP42-3×FLAG protein encoded by SEQ ID NO: 57. The AtRLP23-eJMAtRLP42-3×FLAG protein comprises the amino acid sequence set forth in SEQ ID NO: 56 (amino acids 1-888), operably linked to a linking amino acid (amino acid 889), operably linked to the 3×FLAG peptide (amino acids 890-916).

[0082] SEQ ID NO: 59 sets forth the nucleotide sequence of the AtRLP23-eJMAtRLP42-AtEFR polynucleotide construct. The construct comprises in operable linkage nucleotide sequences encoding the AtRLP23 apoplastic domain (nucleotides 1-2496), the AtRLP42 eJM domain (nucleotides 2497-2544), the AtRLP23 TM and the first part of two parts of the cytoplasmic domain (nucleotides 2545-3298), an AtEFR intron (nucleotides 3299-3385), and the second part of the cytoplasmic domain (nucleotides 3386-3777). If desired, a stop codon (e.g. TAA, TAG, or TGA) can be operably linked to the 3′ end of a nucleic acid molecule comprising SEQ ID NO: 59.

[0083] SEQ ID NO: 60 sets forth the amino acid sequence of AtRLP23-eJMAtRLP42-AtEFR protein encoded by SEQ ID NO: 59. The AtRLP23-eJMAtRLP42-AtEFR protein comprises the AtRLP23 apoplastic domain (amino acids 1-832), the AtRLP42 eJM domain (amino acids 833-848), and the AtEFR TM and cytoplasmic domains (amino acids 849-1230).

[0084] SEQ ID NO: 61 sets forth the nucleotide sequence of the AtRLP23-eJMAtRLP42-AtEFR-3×FLAG polynucleotide construct. The construct comprises the nucleotide sequence of SEQ ID NO: 59 (nucleotides 1-3777), operably linked to a nucleotide sequence encoding a linker dipeptide (nucleotides 3778-3783), operably linked to a nucleotide sequence encoding the 3×FLAG peptide (nucleotides 3784-3864). If desired, a stop codon (e.g. TAA, TAG, or TGA) can be operably linked to the 3′ end of a nucleic acid molecule comprising SEQ ID NO: 61. It is noted that in the Examples below, the stop codon TGA was used with this construct.

[0085] SEQ ID NO: 62 sets forth the amino acid sequence of AtRLP23-eJMAtRLP42-AtEFR-3×FLAG protein encoded by SEQ ID NO: 61. The AtRLP23-eJMAtRLP42-AtEFR-3×FLAG protein comprises the amino acid sequence set forth in SEQ ID NO: 60 (amino acids 1-1230), operably linked to a linker dipeptide (amino acids 1231-1232), operably linked to the 3×FLAG peptide (amino acids 1233-1259).

[0086] SEQ ID NO: 63 sets forth the amino acid sequence of the PpNLP20 peptide from Phytophthora parasitica.

[0087] SEQ ID NO: 64 sets forth the amino acid sequence of the CgNLP24b peptide from Colletotrichum graminicola M1.001.

[0088] SEQ ID NO: 65 sets forth the amino acid sequence of the FgNLP24c peptide from Fusarium graminearum PH-1.

[0089] SEQ ID NO: 66 sets forth the amino acid sequence of the FvNLP24a peptide from Fusarium verticillioides 7600.

[0090] SEQ ID NO: 67 sets forth the amino acid sequence of the SmNLP24 peptide from Stenocarpella maydis A1-1.

[0091] SEQ ID NO: 68 sets forth the amino acid sequence of the AfNLP24a peptide from Aspergillus flavus NRRL3357.

[0092] SEQ ID NO: 69 sets forth the amino acid sequence of the AfNLP24b peptide from Aspergillus flavus NRRL3357.

[0093] SEQ ID NO: 70 sets forth the amino acid sequence of the AfNLP24c peptide from Aspergillus flavus NRRL3357.

[0094] SEQ ID NO: 71 sets forth the amino acid sequence of the ApNLP24a peptide from Aspergillus parasiticus SU-1.

[0095] SEQ ID NO: 72 sets forth the nucleotide sequence of the 2×355+Omega (Ω) promoter construct. The construct comprises in operable linkage two copies of the Cauliflower Mosaic Virus 35S (CaMV 35S) promoter (nucleotides 1-327 and 328-653) and the 5′-untranslated region (UTR) omega (Ω) region of from Tobacco Mosaic Virus (nucleotides 627-828).

[0096] SEQ ID NO: 73 sets forth the nucleotide sequence of the 3′ UTR of the small subunit ribulose bisphosphate carboxylase/oxygenase E9 gene from pea (Pisum sativum) (referred to here as “rbcS termination region”, “rbcS terminator”, or simply “rbcS”).

[0097] SEQ ID NO: 74 sets forth the nucleotide sequence of the circular pUC19 vector.

[0098] SEQ ID NO: 75 sets forth the nucleotide sequence of the circular ZmUbi::R-GECO1.2::rbcS vector construct. The construct comprises in operable linkage the Zea mays ubiquitin promoter (ZmUbi) (nucleotides 5-899), the first of two parts of the Z. mays ubiquitin 5′-UTR (nucleotides 900-981), an intron from the Z. mays ubiquitin gene that is found in this same position within the Z. mays ubiquitin 5′-UTR (nucleotides 982-1991), and the second part of the Z. mays ubiquitin 5′-UTR (nucleotides 1992-1993), a coding sequence for R-GECO1.2 (nucleotides 1994-3247), and the rbcS termination region (nucleotides 3252-3893).

[0099] SEQ ID NO: 76 sets forth the nucleotide sequence of the circular ZmUbi::Aequorin::rbcS vector construct. The construct comprises in operable linkage the Zea mays ubiquitin promoter (ZmUbi) (nucleotides 5-899), the first of two parts of the Z. mays ubiquitin 5′-UTR (nucleotides 900-981), an intron from the Z. mays ubiquitin gene that is found in this same position within the Z. mays ubiquitin 5′-UTR (nucleotides 982-1991), and the second part of the Z. mays ubiquitin 5′-UTR (nucleotides 1992-1993), a coding sequence for Aequorin (nucleotides 1994-2584), and the rbcS termination region (nucleotides 2589-3230).

[0100] Each of SEQ ID NOS: 77-240 and 561-563 sets forth the amino acid sequence of a kinase domain from a plant receptor-like kinases (RLK) from Arabidopsis thaliana, Medicago truncatula, Oryza sativa, or Solanum lycopersicum that can be used in the methods and compositions of present invention as described elsewhere herein. In the following descriptions for each of these sequences, the RLK subgroup (if assigned or otherwise known) and the plant species from which each sequence the RLK was derived is provided in parentheses.

[0101] SEQ ID NO: 77 sets forth the amino acid sequence of the kinase domain from the RLK protein encoded by gene locus AT1g01740 (RLCK; Arabidopsis thaliana).

[0102] SEQ ID NO: 78 sets forth the amino acid sequence of the kinase domain from the RLK protein encoded by gene locus AT1g80640 (RLCK; Arabidopsis thaliana).

[0103] SEQ ID NO: 79 sets forth the amino acid sequence of the kinase domain from the RLK protein encoded by gene locus AT3g59350 (RLCK; Arabidopsis thaliana).

[0104] SEQ ID NO: 80 sets forth the amino acid sequence of the kinase domain from the RLK protein encoded by gene locus AT4g35230 (RLCK; Arabidopsis thaliana).

[0105] SEQ ID NO: 81 sets forth the amino acid sequence of the kinase domain from the RLK protein encoded by gene locus AT5G13160 (RLCK; Arabidopsis thaliana).

[0106] SEQ ID NO: 82 sets forth the amino acid sequence of the kinase domain from the RLK protein encoded by gene locus AT5g57670 (RLCK; Arabidopsis thaliana).

[0107] SEQ ID NO: 83 sets forth the amino acid sequence of the kinase domain from the RLK protein encoded by gene locus AT5g58940 (RLCK; Arabidopsis thaliana).

[0108] SEQ ID NO: 84 sets forth the amino acid sequence of the kinase domain from the RLK protein encoded by gene locus AT2G39180 (CR4L; Arabidopsis thaliana).

[0109] SEQ ID NO: 85 sets forth the amino acid sequence of the kinase domain from the RLK protein encoded by gene locus LOC_Os08g01830 (CR4L; Oryza sativa).

[0110] SEQ ID NO: 86 sets forth the amino acid sequence of the kinase domain from the RLK protein encoded by gene locus Medtr1g064560 (CR4L; Medicago truncatula).

[0111] SEQ ID NO: 87 sets forth the amino acid sequence of the kinase domain from the RLK protein encoded by gene locus Solyc09g007750.2 (CR4L; Solanum lycopersicum).

[0112] SEQ ID NO: 88 sets forth the amino acid sequence of the kinase domain from the RLK protein encoded by gene locus Solyc07g049180.2 (LysM; Solanum lycopersicum).

[0113] SEQ ID NO: 89 sets forth the amino acid sequence of the kinase domain from the RLK protein encoded by gene locus AT3G24550 (PERK; Arabidopsis thaliana).

[0114] SEQ ID NO: 90 sets forth the amino acid sequence of the kinase domain from the RLK protein encoded by gene locus LOC_Os03g16260 (PERK; Oryza sativa).

[0115] SEQ ID NO: 91 sets forth the amino acid sequence of the kinase domain from the RLK protein encoded by gene locus LOC_Os05g12680 (PERK; Oryza sativa).

[0116] SEQ ID NO: 92 sets forth the amino acid sequence of the kinase domain from the RLK protein encoded by gene locus Medtr5g034210 (PERK; Medicago truncatula).

[0117] SEQ ID NO: 93 sets forth the amino acid sequence of the kinase domain from the RLK protein encoded by gene locus Medtr6g088610 (PERK; Medicago truncatula).

[0118] SEQ ID NO: 94 sets forth the amino acid sequence of the kinase domain from the RLK protein encoded by gene locus Solyc10g051330.1 (PERK; Solanum lycopersicum).

[0119] SEQ ID NO: 95 sets forth the amino acid sequence of the kinase domain from the RLK protein encoded by gene locus Solyc12g007110.1 (PERK; Solanum lycopersicum).

[0120] SEQ ID NO: 96 sets forth the amino acid sequence of the kinase domain from the RLK protein encoded by gene locus AT1G11050 (RKF3; Arabidopsis thaliana).

[0121] SEQ ID NO: 97 sets forth the amino acid sequence of the kinase domain from the RLK protein encoded by gene locus LOC_Os05g34950 (RKF3; Oryza sativa).

[0122] SEQ ID NO: 98 sets forth the amino acid sequence of the kinase domain from the RLK protein encoded by gene locus Medtr2g006910 (RKF3; Medicago truncatula).

[0123] SEQ ID NO: 99 sets forth the amino acid sequence of the kinase domain from the RLK protein encoded by gene locus Solyc01g104050.2 (RKF3; Solanum lycopersicum).

[0124] SEQ ID NO: 100 sets forth the amino acid sequence of the kinase domain from the RLK protein encoded by gene locus AT3G28040 (LRR-VIIa; Arabidopsis thaliana).

[0125] SEQ ID NO: 101 sets forth the amino acid sequence of the kinase domain from the RLK protein encoded by gene locus LOC_Os01g72700 (LRR-VIIa; Oryza sativa).

[0126] SEQ ID NO: 102 sets forth the amino acid sequence of the kinase domain from the RLK protein encoded by gene locus Medtr7g022160v2 (LRR-VIIa; Medicago truncatula).

[0127] SEQ ID NO: 103 sets forth the amino acid sequence of the kinase domain from the RLK protein encoded by gene locus Solyc09g098290.2 (LRR-VIIa; Solanum lycopersicum).

[0128] SEQ ID NO: 104 sets forth the amino acid sequence of the kinase domain from the RLK protein encoded by gene locus AT1G66980 (LRK10L-2/GDPD; Arabidopsis thaliana).

[0129] SEQ ID NO: 105 sets forth the amino acid sequence of the kinase domain from the RLK protein encoded by gene locus AT1g49730 (URK; Arabidopsis thaliana).

[0130] SEQ ID NO: 106 sets forth the amino acid sequence of the kinase domain from the RLK protein encoded by gene locus Medtr3g075440 (unassigned; Medicago truncatula).

[0131] SEQ ID NO: 107 sets forth the amino acid sequence of the kinase domain from the RLK protein (WAK1) encoded by gene locus AT1G21250 (WAK; Arabidopsis thaliana).

[0132] SEQ ID NO: 108 sets forth the amino acid sequence of the kinase domain from the RLK protein encoded by gene locus LOC_Os04g51040 (WAK; Oryza sativa).

[0133] SEQ ID NO: 109 sets forth the amino acid sequence of the kinase domain from the RLK protein encoded by gene locus LOC_Os04g51050 (WAK5; Oryza sativa).

[0134] SEQ ID NO: 110 sets forth the amino acid sequence of the kinase domain from the RLK protein encoded by gene locus Medtr1g010250 (WAK; Medicago truncatula).

[0135] SEQ ID NO: 111 sets forth the amino acid sequence of the kinase domain from the RLK protein encoded by gene locus Medtr1g027670 (WAK; Medicago truncatula).

[0136] SEQ ID NO: 112 sets forth the amino acid sequence of the kinase domain from the RLK protein encoded by gene locus Medtr6g083020 (WAK; Medicago truncatula).

[0137] SEQ ID NO: 113 sets forth the amino acid sequence of the kinase domain from the RLK protein encoded by gene locus OsXa21 (LRR; Oryza sativa).

[0138] SEQ ID NO: 114 sets forth the amino acid sequence of the kinase domain from the RLK protein encoded by gene locus Solyc09g015240.1 (WAK; Solanum lycopersicum).

[0139] SEQ ID NO: 115 sets forth the amino acid sequence of the kinase domain from the RLK protein encoded by gene locus Solyc11g072140.1 (WAK; Solanum lycopersicum).

[0140] SEQ ID NO: 116 sets forth the amino acid sequence of the kinase domain from the RLK protein encoded by gene locus AT1G18390v2 (LRK10L-1; Arabidopsis thaliana).

[0141] SEQ ID NO: 117 sets forth the amino acid sequence of the kinase domain from the RLK protein encoded by gene locus AT5G38210v2 (LRK10L-1; Arabidopsis thaliana).

[0142] SEQ ID NO: 118 sets forth the amino acid sequence of the kinase domain from the RLK protein encoded by gene locus Solyc02g086210.2 (LRK10L-2; Solanum lycopersicum).

[0143] SEQ ID NO: 119 sets forth the amino acid sequence of the kinase domain from the RLK protein encoded by gene locus Medtr7g082470v2 (WAK; Medicago truncatula).

[0144] SEQ ID NO: 120 sets forth the amino acid sequence of the kinase domain from the RLK protein encoded by gene locus Solyc03g119240.2 (WAK; Solanum lycopersicum).

[0145] SEQ ID NO: 121 sets forth the amino acid sequence of the kinase domain from the RLK protein encoded by gene locus AT1G66930v2 (LRK10L-2/WAK; Arabidopsis thaliana).

[0146] SEQ ID NO: 122 sets forth the amino acid sequence of the kinase domain from the RLK protein encoded by gene locus LOC_Os01g49614 (LRK10L-2/WAK; Oryza sativa).

[0147] SEQ ID NO: 123 sets forth the amino acid sequence of the kinase domain from the RLK protein encoded by gene locus AT4G23190 (DUF26-Ib; Arabidopsis thaliana).

[0148] SEQ ID NO: 124 sets forth the amino acid sequence of the kinase domain from the RLK protein encoded by gene locus Medtr1g105650 (DUF26-Ib; Medicago truncatula).

[0149] SEQ ID NO: 125 sets forth the amino acid sequence of the kinase domain from the RLK protein encoded by gene locus Solyc02g080040.2 (DUF26-Ib; Solanum lycopersicum).

[0150] SEQ ID NO: 126 sets forth the amino acid sequence of the kinase domain from the RLK protein encoded by gene locus LOC_Os07g35310 (DUF26-Ig; Oryza sativa).

[0151] SEQ ID NO: 127 sets forth the amino acid sequence of the kinase domain from the RLK protein encoded by gene locus LOC_Os01g04409 (WAK; Oryza sativa).

[0152] SEQ ID NO: 128 sets forth the amino acid sequence of the kinase domain from the RLK protein encoded by gene locus AT1G52310 (C-LEC; Arabidopsis thaliana).

[0153] SEQ ID NO: 129 sets forth the amino acid sequence of the kinase domain from the RLK protein encoded by gene locus LOC_Os01g01410 (C-LEC; Oryza sativa).

[0154] SEQ ID NO: 130 sets forth the amino acid sequence of the kinase domain from the RLK protein encoded by gene locus Medtr2g043380 (C-Lec; Medicago truncatula).

[0155] SEQ ID NO: 131 sets forth the amino acid sequence of the kinase domain from the RLK protein encoded by gene locus Solyc02g068370.2 (C-Lec; Solanum lycopersicum).

[0156] SEQ ID NO: 132 sets forth the amino acid sequence of the kinase domain from the RLK protein encoded by gene locus AT4G02010v2 (Extensin; Arabidopsis thaliana).

[0157] SEQ ID NO: 133 sets forth the amino acid sequence of the kinase domain from the RLK protein encoded by gene locus AT5G56890 (Extensin; Arabidopsis thaliana).

[0158] SEQ ID NO: 134 sets forth the amino acid sequence of the kinase domain from the RLK protein encoded by gene locus LOC_Os01g14932 (Extensin; Oryza sativa).

[0159] SEQ ID NO: 135 sets forth the amino acid sequence of the kinase domain from the RLK protein encoded by gene locus LOC_Os01g51290 (Extensin; Oryza sativa).

[0160] SEQ ID NO: 136 sets forth the amino acid sequence of the kinase domain from the RLK protein encoded by gene locus LOC_Os05g11750 (Extensin; Oryza sativa).

[0161] SEQ ID NO: 137 sets forth the amino acid sequence of the kinase domain from the RLK protein encoded by gene locus LOC_Os05g33080 (Extensin; Oryza sativa).

[0162] SEQ ID NO: 138 sets forth the amino acid sequence of the kinase domain from the RLK protein encoded by gene locus Medtr1g082580 (Extensin; Medicago truncatula).

[0163] SEQ ID NO: 139 sets forth the amino acid sequence of the kinase domain from the RLK protein encoded by gene locus Medtr2g039290 (Extensin; Medicago truncatula).

[0164] SEQ ID NO: 140 sets forth the amino acid sequence of the kinase domain from the RLK protein encoded by gene locus Medtr2g084120 (Extensin; Medicago truncatula).

[0165] SEQ ID NO: 141 sets forth the amino acid sequence of the kinase domain from the RLK protein encoded by gene locus Medtr7g109670 (Extensin; Medicago truncatula).

[0166] SEQ ID NO: 142 sets forth the amino acid sequence of the kinase domain from the RLK protein encoded by gene locus Solyc01g079340.2 (Extensin; Solanum lycopersicum).

[0167] SEQ ID NO: 143 sets forth the amino acid sequence of the kinase domain from the RLK protein encoded by gene locus Solyc07g039340.2 (Extensin; Solanum lycopersicum).

[0168] SEQ ID NO: 144 sets forth the amino acid sequence of the kinase domain from the RLK protein encoded by gene locus Solyc07g055180.2 (Extensin; Solanum lycopersicum).

[0169] SEQ ID NO: 145 sets forth the amino acid sequence of the kinase domain from the RLK protein encoded by gene locus AT1G65790 (SD-1a/G-Lec; Arabidopsis thaliana).

[0170] SEQ ID NO: 146 sets forth the amino acid sequence of the kinase domain from the RLK protein encoded by gene locus AT2G41890 (SD-3/G-Lec; Arabidopsis thaliana).

[0171] SEQ ID NO: 147 sets forth the amino acid sequence of the kinase domain from the RLK protein encoded by gene locus AT4G00340 (SD-2b/G-Lec; Arabidopsis thaliana).

[0172] SEQ ID NO: 148 sets forth the amino acid sequence of the kinase domain from the RLK protein encoded by gene locus LOC_Os01g45520 (SD-2b/G-Lec; Oryza sativa).

[0173] SEQ ID NO: 149 sets forth the amino acid sequence of the kinase domain from the RLK protein encoded by gene locus LOC_Os03g35600 (SD-1a/G-Lec; Oryza sativa).

[0174] SEQ ID NO: 150 sets forth the amino acid sequence of the kinase domain from the RLK protein encoded by gene locus LOC_Os07g36780 (SD-2b/G-Lec; Oryza sativa).

[0175] SEQ ID NO: 151 sets forth the amino acid sequence of the kinase domain from the RLK protein encoded by gene locus Medtr0280s0040 (SD-2b/G-Lec; Medicago truncatula).

[0176] SEQ ID NO: 152 sets forth the amino acid sequence of the kinase domain from the RLK protein encoded by gene locus Medtr4g091670 (SD-1a/G-Lec; Medicago truncatula).

[0177] SEQ ID NO: 153 sets forth the amino acid sequence of the kinase domain from the RLK protein encoded by gene locus Medtr7g092050 (SD-3/G-Lec; Medicago truncatula).

[0178] SEQ ID NO: 154 sets forth the amino acid sequence of the kinase domain from the RLK protein encoded by gene locus Medtr8g030500 (SD-2b/G-Lec; Medicago truncatula).

[0179] SEQ ID NO: 155 sets forth the amino acid sequence of the kinase domain from the RLK protein encoded by gene locus Solyc01g094830.2v2 (SD-2b/G-Lec; Solanum lycopersicum).

[0180] SEQ ID NO: 156 sets forth the amino acid sequence of the kinase domain from the RLK protein encoded by gene locus Solyc02g079590.2 (SD-1a/G-Lec; Solanum lycopersicum).

[0181] SEQ ID NO: 157 sets forth the amino acid sequence of the kinase domain from the RLK protein encoded by gene locus Solyc03g063650.1 (SD-3/G-Lec; Solanum lycopersicum).

[0182] SEQ ID NO: 158 sets forth the amino acid sequence of the kinase domain from the RLK protein encoded by gene locus AT2G31880 (unassigned; Arabidopsis thaliana) which is the locus that encodes AtSOBIR1. The full-length AtSOBIR1 amino acid sequence is set forth in SEQ ID NO: 8.

[0183] SEQ ID NO: 159 sets forth the amino acid sequence of the kinase domain from the RLK protein encoded by gene locus LOC_Os01g72990 (LRR-VIII-1; Oryza sativa).

[0184] SEQ ID NO: 160 sets forth the amino acid sequence of the kinase domain from the RLK protein encoded by gene locus LOC_Os05g40770 (LRR-VIII-1; Oryza sativa).

[0185] SEQ ID NO: 161 sets forth the amino acid sequence of the kinase domain from the RLK protein encoded by gene locus LOC_Os12g10740 (LRR-VIII-1; Oryza sativa).

[0186] SEQ ID NO: 162 sets forth the amino acid sequence of the kinase domain from the RLK protein encoded by gene locus Medtr3g062590 (LRR-VIII-1; Medicago truncatula).

[0187] SEQ ID NO: 163 sets forth the amino acid sequence of the kinase domain from the RLK protein encoded by gene locus Medtr8g070880 (LRR-VIII-1; Medicago truncatula).

[0188] SEQ ID NO: 164 sets forth the amino acid sequence of the kinase domain from the RLK protein encoded by gene locus AT3G14840 (LRR-VIII-2; Arabidopsis thaliana).

[0189] SEQ ID NO: 165 sets forth the amino acid sequence of the kinase domain from the RLK protein encoded by gene locus LOC_Os09g17630 (LRR-VIII-2; Oryza sativa).

[0190] SEQ ID NO: 166 sets forth the amino acid sequence of the kinase domain from the RLK protein encoded by gene locus LOC_Os12g41710 (LRR-VIII-2; Oryza sativa).

[0191] SEQ ID NO: 167 sets forth the amino acid sequence of the kinase domain from the RLK protein encoded by gene locus Medtr2g075010 (LRR-VIII-2; Medicago truncatula).

[0192] SEQ ID NO: 168 sets forth the amino acid sequence of the kinase domain from the RLK protein encoded by gene locus Solyc12g014350.1 (LRR-VIII-2; Solanum lycopersicum).

[0193] SEQ ID NO: 169 sets forth the amino acid sequence of the kinase domain from the RLK protein encoded by gene locus AT3G51550 (CrRLK1L-1; Arabidopsis thaliana).

[0194] SEQ ID NO: 170 sets forth the amino acid sequence of the kinase domain from the RLK protein encoded by gene locus LOC_Os03g21540 (CrRLK1L-1; Oryza sativa).

[0195] SEQ ID NO: 171 sets forth the amino acid sequence of the kinase domain from the RLK protein encoded by gene locus Medtr7g073660 (CrRLK1L-1; Medicago truncatula).

[0196] SEQ ID NO: 172 sets forth the amino acid sequence of the kinase domain from the RLK protein encoded by gene locus AT3G08870 (L-LEC; Arabidopsis thaliana).

[0197] SEQ ID NO: 173 sets forth the amino acid sequence of the kinase domain from the RLK protein encoded by gene locus AT3G59700 (L-LEC; Arabidopsis thaliana).

[0198] SEQ ID NO: 174 sets forth the amino acid sequence of the kinase domain from the RLK protein encoded by gene locus LOC_Os07g03830 (L-Lec; Oryza sativa).

[0199] SEQ ID NO: 175 sets forth the amino acid sequence of the kinase domain from the RLK protein encoded by gene locus Medtr7g062990 (L-Lec; Medicago truncatula).

[0200] SEQ ID NO: 176 sets forth the amino acid sequence of the kinase domain from the RLK protein encoded by gene locus Solyc05g053010.1 (L-Lec; Solanum lycopersicum).

[0201] SEQ ID NO: 177 sets forth the amino acid sequence of the kinase domain from the RLK protein encoded by gene locus Solyc06g009550.2 (CrRLK1L1; Solanum lycopersicum).

[0202] SEQ ID NO: 178 sets forth the amino acid sequence of the kinase domain from the RLK protein encoded by gene locus AT1G53730 (LRR-V; Arabidopsis thaliana).

[0203] SEQ ID NO: 179 sets forth the amino acid sequence of the kinase domain from the RLK protein encoded by gene locus LOC_Os03g08550 (LRR-V; Oryza sativa).

[0204] SEQ ID NO: 180 sets forth the amino acid sequence of the kinase domain from the RLK protein encoded by gene locus Medtr7g117520 (LRR-V; Medicago truncatula).

[0205] SEQ ID NO: 181 sets forth the amino acid sequence of the kinase domain from the RLK protein encoded by gene locus Solyc03g123740.2 (LRR-V; Solanum lycopersicum).

[0206] SEQ ID NO: 182 sets forth the amino acid sequence of the kinase domain from the RLK protein encoded by gene locus AT5G38280 (LRK10L-2/thaumatin; Arabidopsis thaliana).

[0207] SEQ ID NO: 183 sets forth the amino acid sequence of the kinase domain from the RLK protein encoded by gene locus AT1G48480 (LRR-III; Arabidopsis thaliana).

[0208] SEQ ID NO: 184 sets forth the amino acid sequence of the kinase domain from the RLK protein encoded by gene locus LOC_Os03g50450 (LRR-III; Oryza sativa).

[0209] SEQ ID NO: 185 sets forth the amino acid sequence of the kinase domain from the RLK protein encoded by gene locus Medtr8g107470 (LRR-III; Medicago truncatula).

[0210] SEQ ID NO: 186 sets forth the amino acid sequence of the kinase domain from the RLK protein encoded by gene locus Solyc03g118510.2 (LRR-III; Solanum lycopersicum).

[0211] SEQ ID NO: 187 sets forth the amino acid sequence of the kinase domain from the RLK protein encoded by gene locus LOC_Os06g18000 (unassigned; Oryza sativa).

[0212] SEQ ID NO: 188 sets forth the amino acid sequence of the kinase domain from the RLK protein encoded by gene locus AT3G47090 (LRR-XII; Arabidopsis thaliana).

[0213] SEQ ID NO: 189 sets forth the amino acid sequence of the kinase domain from the RLK protein encoded by gene locus AT5G20480 (LRR-XII-AtEFR; Arabidopsis thaliana), which is the locus that encodes AtEFR. The full-length AtEFR amino acid sequence is set forth in SEQ ID NO: 6.

[0214] SEQ ID NO: 190 sets forth the amino acid sequence of the kinase domain from the RLK protein encoded by gene locus LOC_Os12g42520 (LRR-XII; Oryza sativa).

[0215] SEQ ID NO: 191 sets forth the amino acid sequence of the kinase domain from the RLK protein encoded by gene locus Medtr5g019070v2 (LRR-XII; Medicago truncatula).

[0216] SEQ ID NO: 192 sets forth the amino acid sequence of the kinase domain from the RLK protein encoded by gene locus Medtr5g044680 (LRR-XII; Medicago truncatula).

[0217] SEQ ID NO: 193 sets forth the amino acid sequence of the kinase domain from the RLK protein encoded by gene locus Solyc03g019980.1v2 (LRR-XII; Solanum lycopersicum).

[0218] SEQ ID NO: 194 sets forth the amino acid sequence of the kinase domain from the RLK protein encoded by gene locus Solyc06g076910.1 (LRR-XII; Solanum lycopersicum).

[0219] SEQ ID NO: 195 sets forth the amino acid sequence of the kinase domain from the RLK protein encoded by gene locus AT2G16250 (LRR-XIV; Arabidopsis thaliana).

[0220] SEQ ID NO: 196 sets forth the amino acid sequence of the kinase domain from the RLK protein encoded by gene locus LOC_Os03g51440 (LRR-XIV; Oryza sativa).

[0221] SEQ ID NO: 197 sets forth the amino acid sequence of the kinase domain from the RLK protein encoded by gene locus Medtr3g116640 (LRR-XIV; Medicago truncatula).

[0222] SEQ ID NO: 198 sets forth the amino acid sequence of the kinase domain from the RLK protein encoded by gene locus Solyc01g109650.2 (LRR-XIV; Solanum lycopersicum).

[0223] SEQ ID NO: 199 sets forth the amino acid sequence of the kinase domain from the RLK protein encoded by gene locus AT3G46420 (LRR-Ia; Arabidopsis thaliana).

[0224] SEQ ID NO: 200 sets forth the amino acid sequence of the kinase domain from the RLK protein encoded by gene locus LOC_Os05g44970 (LRR-Ia; Oryza sativa).

[0225] SEQ ID NO: 201 sets forth the amino acid sequence of the kinase domain from the RLK protein encoded by gene locus Medtr8g015340 (LRR-Ia; Medicago truncatula).

[0226] SEQ ID NO: 202 sets forth the amino acid sequence of the kinase domain from the RLK protein encoded by gene locus Solyc03g121230.2 (LRR-Ia; Solanum lycopersicum).

[0227] SEQ ID NO: 203 sets forth the amino acid sequence of the kinase domain from the RLK protein encoded by gene locus AT4G33430.1 (LRR-II; Arabidopsis thaliana).

[0228] SEQ ID NO: 204 sets forth the amino acid sequence of the kinase domain from the RLK protein encoded by gene locus LOC_Os08g07760 (LRR-II; Oryza sativa).

[0229] SEQ ID NO: 205 sets forth the amino acid sequence of the kinase domain from the RLK protein encoded by gene locus Medtr2g008360 (LRR-II; Medicago truncatula).

[0230] SEQ ID NO: 206 sets forth the amino acid sequence of the kinase domain from the RLK protein encoded by gene locus Solyc04g039730.2 (LRR-II; Solanum lycopersicum).

[0231] SEQ ID NO: 207 sets forth the amino acid sequence of the kinase domain from the RLK protein encoded by gene locus Solyc10g047140.1 (LRR-II; Solanum lycopersicum).

[0232] SEQ ID NO: 208 sets forth the amino acid sequence of the kinase domain from the RLK protein encoded by gene locus AT2G45340 (LRR-IV; Arabidopsis thaliana).

[0233] SEQ ID NO: 209 sets forth the amino acid sequence of the kinase domain from the RLK protein encoded by gene locus LOC_Os06g04370 (LRR-IV; Oryza sativa).

[0234] SEQ ID NO: 210 sets forth the amino acid sequence of the kinase domain from the RLK protein encoded by gene locus Medtr3g071480 (LRR-IV; Medicago truncatula).

[0235] SEQ ID NO: 211 sets forth the amino acid sequence of the kinase domain from the RLK protein encoded by gene locus Medtr6g060230 (LRR-IV; Medicago truncatula).

[0236] SEQ ID NO: 212 sets forth the amino acid sequence of the kinase domain from the RLK protein encoded by gene locus Solyc01g091230.2 (LRR-IV; Solanum lycopersicum).

[0237] SEQ ID NO: 213 sets forth the amino acid sequence of the kinase domain from the RLK protein encoded by gene locus AT1G66150 (LRR-IX; Arabidopsis thaliana).

[0238] SEQ ID NO: 214 sets forth the amino acid sequence of the kinase domain from the RLK protein encoded by gene locus LOC_Os03g50810 (LRR-IX; Oryza sativa).

[0239] SEQ ID NO: 215 sets forth the amino acid sequence of the kinase domain from the RLK protein encoded by gene locus Medtr5g077430 (LRR-IX; Medicago truncatula).

[0240] SEQ ID NO: 216 sets forth the amino acid sequence of the kinase domain from the RLK protein encoded by gene locus Solyc09g092460.2 (LRR-IX; Solanum lycopersicum).

[0241] SEQ ID NO: 217 sets forth the amino acid sequence of the kinase domain from the RLK protein encoded by gene locus Solyc11g006040.1 (LRR-IX; Solanum lycopersicum).

[0242] SEQ ID NO: 218 sets forth the amino acid sequence of the kinase domain from the RLK protein encoded by gene locus AT2G40270 (LRR-VI; Arabidopsis thaliana).

[0243] SEQ ID NO: 219 sets forth the amino acid sequence of the kinase domain from the RLK protein encoded by gene locus AT5G07150 (LRR-VI; Arabidopsis thaliana).

[0244] SEQ ID NO: 220 sets forth the amino acid sequence of the kinase domain from the RLK protein encoded by gene locus LOC_Os03g18370 (LRR-VI; Oryza sativa).

[0245] SEQ ID NO: 221 sets forth the amino acid sequence of the kinase domain from the RLK protein encoded by gene locus Solyc06g051030.2 (LRR-VI; Solanum lycopersicum).

[0246] SEQ ID NO: 222 sets forth the amino acid sequence of the kinase domain from the RLK protein encoded by gene locus AT4G39400 (LRR-Xb; Arabidopsis thaliana).

[0247] SEQ ID NO: 223 sets forth the amino acid sequence of the kinase domain from the RLK protein encoded by gene locus LOC_Os09g12240 (LRR-Xb; Oryza sativa).

[0248] SEQ ID NO: 224 sets forth the amino acid sequence of the kinase domain from the RLK protein encoded by gene locus Medtr3g095100 (LRR-Xb; Medicago truncatula).

[0249] SEQ ID NO: 225 sets forth the amino acid sequence of the kinase domain from the RLK protein encoded by gene locus Solyc04g051510.1 (LRR-Xb; Solanum lycopersicum).

[0250] SEQ ID NO: 226 sets forth the amino acid sequence of the kinase domain from the RLK protein encoded by gene locus AT1G75820 (LRR-XI; Arabidopsis thaliana).

[0251] SEQ ID NO: 227 sets forth the amino acid sequence of the kinase domain from the RLK protein encoded by gene locus LOC_Os03g56270 (LRR-XI; Oryza sativa).

[0252] SEQ ID NO: 228 sets forth the amino acid sequence of the kinase domain from the RLK protein encoded by gene locus Medtr4g070970 (LRR-XI; Medicago truncatula).

[0253] SEQ ID NO: 229 sets forth the amino acid sequence of the kinase domain from the RLK protein encoded by gene locus Solyc04g081590.2 (LRR-XI; Solanum lycopersicum).

[0254] SEQ ID NO: 230 sets forth the amino acid sequence of the kinase domain from the RLK protein encoded by gene locus Solyc06g071810.1 (LRR-XV; Solanum lycopersicum).

[0255] SEQ ID NO: 231 sets forth the amino acid sequence of the kinase domain from the RLK protein encoded by gene locus LOC_Os04g59320 (URK-I; Oryza sativa).

[0256] SEQ ID NO: 232 sets forth the amino acid sequence of the kinase domain from the RLK protein encoded by gene locus Medtr4g085810 (URK-I; Medicago truncatula).

[0257] SEQ ID NO: 233 sets forth the amino acid sequence of the kinase domain from the RLK protein encoded by gene locus Solyc01g108000.2 (URK-I; Solanum lycopersicum).

[0258] SEQ ID NO: 234 sets forth the amino acid sequence of the kinase domain from the RLK protein encoded by gene locus AT2G26330 (LRR-XIIIb; Arabidopsis thaliana).

[0259] SEQ ID NO: 235 sets forth the amino acid sequence of the kinase domain from the RLK protein encoded by gene locus LOC_Os02g53720 (LRR-XIIIb; Oryza sativa).

[0260] SEQ ID NO: 236 sets forth the amino acid sequence of the kinase domain from the RLK protein encoded by gene locus Medtr1g015530 (LRR-XIIIb; Medicago truncatula).

[0261] SEQ ID NO: 237 sets forth the amino acid sequence of the kinase domain from the RLK protein encoded by gene locus Solyc08g061560.2 (LRR-XIIIb; Solanum lycopersicum).

[0262] SEQ ID NO: 238 sets forth the amino acid sequence of the kinase domain from the RLK protein encoded by gene locus AT3G21630 (LysM-I; Arabidopsis thaliana).

[0263] SEQ ID NO: 239 sets forth the amino acid sequence of the kinase domain from the RLK protein (OsCERK1) encoded by gene locus LOC_Os08g42580 (LysM-I; Oryza sativa).

[0264] SEQ ID NO: 240 sets forth the amino acid sequence of the kinase domain from the RLK protein encoded by gene locus Medtr3g080050 (LysM-I; Medicago truncatula).

[0265] Each of SEQ ID NOS: 241-390, 541-547, and 564-566 sets forth the amino acid sequence of extra-juxtamembrane (eJM) domain from a plant receptor-like kinases (RLK) from Arabidopsis thaliana, Medicago truncatula, Oryza sativa, or Solanum lycopersicum that can be used in the methods and compositions of present invention as described elsewhere herein.

[0266] SEQ ID NO: 241 sets forth the amino acid sequence of the eJM domain from the RLK protein encoded by gene locus Medtr7g062990 of Medicago truncatula.

[0267] SEQ ID NO: 242 sets forth the amino acid sequence of the eJM domain from the RLK protein encoded by gene locus LOC_Os07g03830 of Oryza sativa.

[0268] SEQ ID NO: 243 sets forth the amino acid sequence of the eJM domain from the RLK protein encoded by gene locus AT3G08870 of Arabidopsis thaliana.

[0269] SEQ ID NO: 244 sets forth the amino acid sequence of the eJM domain from the RLK protein encoded by gene locus LOC_Os03g35600 of Oryza sativa.

[0270] SEQ ID NO: 245 sets forth the amino acid sequence of the eJM domain from the RLK protein encoded by gene locus Medtr4g091670 of Medicago truncatula.

[0271] SEQ ID NO: 246 sets forth the amino acid sequence of the eJM domain from the RLK protein encoded by gene locus AT1G65790 of Arabidopsis thaliana.

[0272] SEQ ID NO: 247 sets forth the amino acid sequence of the eJM domain from the RLK protein encoded by gene locus LOC_Os07g36780 of Oryza sativa.

[0273] SEQ ID NO: 248 sets forth the amino acid sequence of the eJM domain from the RLK protein encoded by gene locus Medtr0280s0040 of Medicago truncatula.

[0274] SEQ ID NO: 249 sets forth the amino acid sequence of the eJM domain from the RLK protein encoded by gene locus Medtr8g030500 of Medicago truncatula.

[0275] SEQ ID NO: 250 sets forth the amino acid sequence of the eJM domain from the RLK protein encoded by gene locus LOC_Os05g11750 of Oryza sativa.

[0276] SEQ ID NO: 251 sets forth the amino acid sequence of the eJM domain from the RLK protein encoded by gene locus AT3G24550 of Arabidopsis thaliana.

[0277] SEQ ID NO: 252 sets forth the amino acid sequence of the eJM domain from the RLK protein encoded by gene locus Solyc10g051330.1 of Solanum lycopersicum.

[0278] SEQ ID NO: 253 sets forth the amino acid sequence of the eJM domain from the RLK protein encoded by gene locus Solyc06g051030.2 of Solanum lycopersicum.

[0279] SEQ ID NO: 254 sets forth the amino acid sequence of the eJM domain from the RLK protein encoded by gene locus Medtr3g071480 of Medicago truncatula.

[0280] SEQ ID NO: 255 sets forth the amino acid sequence of the eJM domain from the RLK protein encoded by gene locus AT4G02010 of Arabidopsis thaliana.

[0281] SEQ ID NO: 256 sets forth the amino acid sequence of the eJM domain from the RLK protein encoded by gene locus Medtr7g109670 of Medicago truncatula.

[0282] SEQ ID NO: 257 sets forth the amino acid sequence of the eJM domain from the RLK protein encoded by gene locus LOC_Os01g14932 of Oryza sativa.

[0283] SEQ ID NO: 258 sets forth the amino acid sequence of the eJM domain from the RLK protein encoded by gene locus LOC_Os05g12680 of Oryza sativa.

[0284] SEQ ID NO: 259 sets forth the amino acid sequence of the eJM domain from the RLK protein encoded by gene locus Solyc12g007110.1 of Solanum lycopersicum.

[0285] SEQ ID NO: 260 sets forth the amino acid sequence of the eJM domain from the RLK protein encoded by gene locus Solyc03g123740.2 of Solanum lycopersicum.

[0286] SEQ ID NO: 261 sets forth the amino acid sequence of the eJM domain from the RLK protein encoded by gene locus Medtr7g117520 of Medicago truncatula.

[0287] SEQ ID NO: 262 sets forth the amino acid sequence of the eJM domain from the RLK protein encoded by gene locus AT1G53730 of Arabidopsis thaliana.

[0288] SEQ ID NO: 263 sets forth the amino acid sequence of the eJM domain from the RLK protein encoded by gene locus LOC_Os03g08550 of Oryza sativa.

[0289] SEQ ID NO: 264 sets forth the amino acid sequence of the eJM domain from the RLK protein encoded by gene locus AT1G48480 of Arabidopsis thaliana.

[0290] SEQ ID NO: 265 sets forth the amino acid sequence of the eJM domain from the RLK protein encoded by gene locus Medtr8g107470 of Medicago truncatula.

[0291] SEQ ID NO: 266 sets forth the amino acid sequence of the eJM domain from the RLK protein encoded by gene locus AT3G28040 of Arabidopsis thaliana.

[0292] SEQ ID NO: 267 sets forth the amino acid sequence of the eJM domain from the RLK protein encoded by gene locus Medtr7g022160v2 of Medicago truncatula.

[0293] SEQ ID NO: 268 sets forth the amino acid sequence of the eJM domain from the RLK protein encoded by gene locus Solyc09g098290.2 of Solanum lycopersicum.

[0294] SEQ ID NO: 269 sets forth the amino acid sequence of the eJM domain from the RLK protein encoded by gene locus LOC_Os01g72700 of Oryza sativa.

[0295] SEQ ID NO: 270 sets forth the amino acid sequence of the eJM domain from the RLK protein encoded by gene locus AT1G66150 of Arabidopsis thaliana.

[0296] SEQ ID NO: 271 sets forth the amino acid sequence of the eJM domain from the RLK protein encoded by gene locus Medtr5g077430 of Medicago truncatula.

[0297] SEQ ID NO: 272 sets forth the amino acid sequence of the eJM domain from the RLK protein encoded by gene locus LOC_Os03g50810 of Oryza sativa.

[0298] SEQ ID NO: 273 sets forth the amino acid sequence of the eJM domain from the RLK protein encoded by gene locus AT5G56890 of Arabidopsis thaliana.

[0299] SEQ ID NO: 274 sets forth the amino acid sequence of the eJM domain from the RLK protein encoded by gene locus Medtr2g039290 of Medicago truncatula.

[0300] SEQ ID NO: 275 sets forth the amino acid sequence of the eJM domain from the RLK protein encoded by gene locus AT3G46420 of Arabidopsis thaliana.

[0301] SEQ ID NO: 276 sets forth the amino acid sequence of the eJM domain from the RLK protein encoded by gene locus Medtr8g015340 of Medicago truncatula.

[0302] SEQ ID NO: 277 sets forth the amino acid sequence of the eJM domain from the RLK protein encoded by gene locus LOC_Os05g44970 of Oryza sativa.

[0303] SEQ ID NO: 278 sets forth the amino acid sequence of the eJM domain from the RLK protein encoded by gene locus LOC_Os03g21540 of Oryza sativa.

[0304] SEQ ID NO: 279 sets forth the amino acid sequence of the eJM domain from the RLK protein encoded by gene locus Medtr7g073660 of Medicago truncatula.

[0305] SEQ ID NO: 280 sets forth the amino acid sequence of the eJM domain from the RLK protein encoded by gene locus Solyc01g108000.2 of Solanum lycopersicum.

[0306] SEQ ID NO: 281 sets forth the amino acid sequence of the eJM domain from the RLK protein encoded by gene locus Medtr4g085810 of Medicago truncatula.

[0307] SEQ ID NO: 282 sets forth the amino acid sequence of the eJM domain from the RLK protein encoded by gene locus AT1g49730 of Arabidopsis thaliana.

[0308] SEQ ID NO: 283 sets forth Solyc06g071810.1 of Solanum lycopersicum. the amino acid sequence of the eJM domain from the RLK protein encoded by gene locus

[0309] SEQ ID NO: 284 sets forth the amino acid sequence of the eJM domain from the RLK protein encoded by gene locus Medtr3g075440 of Medicago truncatula.

[0310] SEQ ID NO: 285 sets forth the amino acid sequence of the eJM domain from the RLK protein encoded by gene locus LOC_Os06g18000 of Oryza sativa.

[0311] SEQ ID NO: 286 sets forth the amino acid sequence of the eJM domain from the RLK protein encoded by gene locus AT1G18390 of Arabidopsis thaliana.

[0312] SEQ ID NO: 287 sets forth the amino acid sequence of the eJM domain from the RLK protein encoded by gene locus Medtr7g082470v2 of Medicago truncatula.

[0313] SEQ ID NO: 288 sets forth the amino acid sequence of the eJM domain from the RLK protein encoded by gene locus Solyc02g086210.2 of Solanum lycopersicum.

[0314] SEQ ID NO: 289 sets forth the amino acid sequence of the eJM domain from the RLK protein encoded by gene locus AT1G66930 of Arabidopsis thaliana.

[0315] SEQ ID NO: 290 sets forth the amino acid sequence of the eJM domain from the RLK protein encoded by gene locus Medtr1g064560 of Medicago truncatula.

[0316] SEQ ID NO: 291 sets forth the amino acid sequence of the eJM domain from the RLK protein encoded by gene locus AT2G39180 of Arabidopsis thaliana.

[0317] SEQ ID NO: 292 sets forth the amino acid sequence of the eJM domain from the RLK protein encoded by gene locus LOC_Os04g51040 of Oryza sativa.

[0318] SEQ ID NO: 293 sets forth the amino acid sequence of the eJM domain from the RLK protein encoded by gene locus LOC_Os04g51050 of Oryza sativa.

[0319] SEQ ID NO: 294 sets forth the amino acid sequence of the eJM domain from the RLK protein encoded by gene locus Solyc11g072140.1 of Solanum lycopersicum.

[0320] SEQ ID NO: 295 sets forth the amino acid sequence of the eJM domain from the RLK protein encoded by gene locus Solyc01g109650.2 of Solanum lycopersicum.

[0321] SEQ ID NO: 296 sets forth the amino acid sequence of the eJM domain from the RLK protein encoded by gene locus Medtr3g116640 of Medicago truncatula.

[0322] SEQ ID NO: 297 sets forth the amino acid sequence of the eJM domain from the RLK protein encoded by gene locus AT2G16250 of Arabidopsis thaliana.

[0323] SEQ ID NO: 298 sets forth the amino acid sequence of the eJM domain from the RLK protein encoded by gene locus AT4G00340 of Arabidopsis thaliana.

[0324] SEQ ID NO: 299 sets forth the amino acid sequence of the eJM domain from the RLK protein encoded by gene locus Solyc01g094830.2 of Solanum lycopersicum.

[0325] SEQ ID NO: 300 sets forth the amino acid sequence of the eJM domain from the RLK protein encoded by gene locus Medtr2g084120 of Medicago truncatula.

[0326] SEQ ID NO: 301 sets forth the amino acid sequence of the eJM domain from the RLK protein encoded by gene locus Solyc03g019980.1 of Solanum lycopersicum.

[0327] SEQ ID NO: 302 sets forth the amino acid sequence of the eJM domain from the RLK protein encoded by gene locus OsXa21LRR of Oryza sativa.

[0328] SEQ ID NO: 303 sets forth the amino acid sequence of the eJM domain from the RLK protein encoded by gene locus Medtr5g044680 of Medicago truncatula.

[0329] SEQ ID NO: 304 sets forth the amino acid sequence of the eJM domain from the RLK protein encoded by gene locus Medtr5g019070v2 of Medicago truncatula.

[0330] SEQ ID NO: 305 sets forth the amino acid sequence of the eJM domain from the RLK protein encoded by gene locus Solyc06g076910.1 of Solanum lycopersicum.

[0331] SEQ ID NO: 306 sets forth the amino acid sequence of the eJM domain from the RLK protein encoded by gene locus LOC_Os12g42520 of Oryza sativa.

[0332] SEQ ID NO: 307 sets forth the amino acid sequence of the eJM domain from the RLK protein encoded by gene locus AT3G47090 of Arabidopsis thaliana.

[0333] SEQ ID NO: 308 sets forth the amino acid sequence of the eJM domain from the RLK protein encoded by gene locus AT5G20480 of Arabidopsis thaliana. AT5G20480 is the locus that encodes AtEFR. The full-length AtEFR amino acid sequence is set forth in SEQ ID NO: 6.

[0334] SEQ ID NO: 309 sets forth the amino acid sequence of the eJM domain from the RLK protein encoded by gene locus Solyc04g051510.1 of Solanum lycopersicum.

[0335] SEQ ID NO: 310 sets forth the amino acid sequence of the eJM domain from the RLK protein encoded by gene locus Medtr3g095100 of Medicago truncatula.

[0336] SEQ ID NO: 311 sets forth the amino acid sequence of the eJM domain from the RLK protein encoded by gene locus AT4G39400 of Arabidopsis thaliana.

[0337] SEQ ID NO: 312 sets forth the amino acid sequence of the eJM domain from the RLK protein encoded by gene locus LOC_Os09g12240 of Oryza sativa.

[0338] SEQ ID NO: 313 sets forth the amino acid sequence of the eJM domain from the RLK protein encoded by gene locus AT2G26330 of Arabidopsis thaliana.

[0339] SEQ ID NO: 314 sets forth the amino acid sequence of the eJM domain from the RLK protein encoded by gene locus Solyc08g061560.2 of Solanum lycopersicum.

[0340] SEQ ID NO: 315 sets forth the amino acid sequence of the eJM domain from the RLK protein encoded by gene locus LOC_Os03g56270 of Oryza sativa.

[0341] SEQ ID NO: 316 sets forth the amino acid sequence of the eJM domain from the RLK protein encoded by gene locus Solyc04g081590.2 of Solanum lycopersicum.

[0342] SEQ ID NO: 317 sets forth the amino acid sequence of the eJM domain from the RLK protein encoded by gene locus AT1G75820 of Arabidopsis thaliana.

[0343] SEQ ID NO: 318 sets forth the amino acid sequence of the eJM domain from the RLK protein encoded by gene locus Medtr4g070970 of Medicago truncatula.

[0344] SEQ ID NO: 319 sets forth the amino acid sequence of the eJM domain from the RLK protein encoded by gene locus Solyc10g047140.1 of Solanum lycopersicum.

[0345] SEQ ID NO: 320 sets forth the amino acid sequence of the eJM domain from the RLK protein encoded by gene locus AT4G33430 of Arabidopsis thaliana.

[0346] SEQ ID NO: 321 sets forth the amino acid sequence of the eJM domain from the RLK protein encoded by gene locus Medtr2g008360 of Medicago truncatula.

[0347] SEQ ID NO: 322 sets forth the amino acid sequence of the eJM domain from the RLK protein encoded by gene locus LOC_Os08g07760 of Oryza sativa.

[0348] SEQ ID NO: 323 sets forth the amino acid sequence of the eJM domain from the RLK protein encoded by gene locus LOC_Os05g40770 of Oryza sativa.

[0349] SEQ ID NO: 324 sets forth the amino acid sequence of the eJM domain from the RLK protein encoded by gene locus Medtr8g070880 of Medicago truncatula.

[0350] SEQ ID NO: 325 sets forth the amino acid sequence of the eJM domain from the RLK protein encoded by gene locus LOC_Os12g10740 of Oryza sativa.

[0351] SEQ ID NO: 326 sets forth the amino acid sequence of the eJM domain from the RLK protein encoded by gene locus LOC_Os01g72990 of Oryza sativa.

[0352] SEQ ID NO: 327 sets forth the amino acid sequence of the eJM domain from the RLK protein encoded by gene locus Medtr3g062590 of Medicago truncatula.

[0353] SEQ ID NO: 328 sets forth the amino acid sequence of the eJM domain from the RLK protein encoded by gene locus AT3G21630 of Arabidopsis thaliana.

[0354] SEQ ID NO: 329 sets forth the amino acid sequence of the eJM domain from the RLK protein encoded by gene locus Medtr3g080050 of Medicago truncatula.

[0355] SEQ ID NO: 330 sets forth the amino acid sequence of the eJM domain from the RLK protein encoded by gene locus Solyc07g049180.2 of Solanum lycopersicum.

[0356] SEQ ID NO: 331 sets forth the amino acid sequence of the eJM domain from the RLK protein encoded by gene locus LOC_Os08g42580 of Oryza sativa.

[0357] SEQ ID NO: 332 sets forth the amino acid sequence of the eJM domain from the RLK protein encoded by gene locus Solyc12g014350.1 of Solanum lycopersicum.

[0358] SEQ ID NO: 333 sets forth the amino acid sequence of the eJM domain from the RLK protein encoded by gene locus Medtr2g075010 of Medicago truncatula.

[0359] SEQ ID NO: 334 sets forth the amino acid sequence of the eJM domain from the RLK protein encoded by gene locus AT3G14840 of Arabidopsis thaliana.

[0360] SEQ ID NO: 335 sets forth the amino acid sequence of the eJM domain from the RLK protein encoded by gene locus LOC_Os09g17630 of Oryza sativa.

[0361] SEQ ID NO: 336 sets forth the amino acid sequence of the eJM domain from the RLK protein encoded by gene locus Medtr7g092050 of Medicago truncatula.

[0362] SEQ ID NO: 337 sets forth the amino acid sequence of the eJM domain from the RLK protein encoded by gene locus AT2G41890 of Arabidopsis thaliana.

[0363] SEQ ID NO: 338 sets forth the amino acid sequence of the eJM domain from the RLK protein encoded by gene locus Solyc03g063650.1 of Solanum lycopersicum.

[0364] SEQ ID NO: 339 sets forth the amino acid sequence of the eJM domain from the RLK protein encoded by gene locus AT1G11050 of Arabidopsis thaliana.

[0365] SEQ ID NO: 340 sets forth the amino acid sequence of the eJM domain from the RLK protein encoded by gene locus Medtr2g006910 of Medicago truncatula.

[0366] SEQ ID NO: 341 sets forth the amino acid sequence of the eJM domain from the RLK protein encoded by gene locus LOC_Os05g34950 of Oryza sativa.

[0367] SEQ ID NO: 342 sets forth the amino acid sequence of the eJM domain from the RLK protein encoded by gene locus Medtr2g043380 of Medicago truncatula.

[0368] SEQ ID NO: 343 sets forth the amino acid sequence of the eJM domain from the RLK protein encoded by gene locus Solyc02g068370.2 of Solanum lycopersicum.

[0369] SEQ ID NO: 344 sets forth the amino acid sequence of the eJM domain from the RLK protein encoded by gene locus Solyc07g055180.2 of Solanum lycopersicum.

[0370] SEQ ID NO: 345 sets forth the amino acid sequence of the eJM domain from the RLK protein encoded by gene locus Solyc05g053010.1 of Solanum lycopersicum.

[0371] SEQ ID NO: 346 sets forth the amino acid sequence of the eJM domain from the RLK protein encoded by gene locus Solyc03g118510.2 of Solanum lycopersicum.

[0372] SEQ ID NO: 347 sets forth the amino acid sequence of the eJM domain from the RLK protein encoded by gene locus LOC_Os01g51290 of Oryza sativa.

[0373] SEQ ID NO: 348 sets forth the amino acid sequence of the eJM domain from the RLK protein encoded by gene locus LOC_Os05g33080 of Oryza sativa.

[0374] SEQ ID NO: 349 sets forth the amino acid sequence of the eJM domain from the RLK protein encoded by gene locus Solyc11g006040.1 of Solanum lycopersicum.

[0375] SEQ ID NO: 350 sets forth the amino acid sequence of the eJM domain from the RLK protein encoded by gene locus AT1G52310 of Arabidopsis thaliana.

[0376] SEQ ID NO: 351 sets forth the amino acid sequence of the eJM domain from the RLK protein encoded by gene locus LOC_Os03g51440 of Oryza sativa.

[0377] SEQ ID NO: 352 sets forth the amino acid sequence of the eJM domain from the RLK protein encoded by gene locus Solyc09g007750.2 of Solanum lycopersicum.

[0378] SEQ ID NO: 353 sets forth the amino acid sequence of the eJM domain from the RLK protein encoded by gene locus Solyc03g119240.2 of Solanum lycopersicum.

[0379] SEQ ID NO: 354 sets forth the amino acid sequence of the eJM domain from the RLK protein encoded by gene locus Medtr6g088610 of Medicago truncatula.

[0380] SEQ ID NO: 355 sets forth the amino acid sequence of the eJM domain from the RLK protein encoded by gene locus AT2G40270 of Arabidopsis thaliana.

[0381] SEQ ID NO: 356 sets forth the amino acid sequence of the eJM domain from the RLK protein encoded by gene locus LOC_Os04g59320 of Oryza sativa.

[0382] SEQ ID NO: 357 sets forth the amino acid sequence of the eJM domain from the RLK protein encoded by gene locus LOC_Os03g50450 of Oryza sativa.

[0383] SEQ ID NO: 358 sets forth the amino acid sequence of the eJM domain from the RLK protein encoded by gene locus LOC_Os01g01410 of Oryza sativa.

[0384] SEQ ID NO: 359 sets forth the amino acid sequence of the eJM domain from the RLK protein encoded by gene locus Solyc04g039730.2 of Solanum lycopersicum.

[0385] SEQ ID NO: 360 sets forth the amino acid sequence of the eJM domain from the RLK protein encoded by gene locus Solyc02g080040.2 of Solanum lycopersicum.

[0386] SEQ ID NO: 361 sets forth the amino acid sequence of the eJM domain from the RLK protein encoded by gene locus Solyc01g079340.2 of Solanum lycopersicum.

[0387] SEQ ID NO: 362 sets forth the amino acid sequence of the eJM domain from the RLK protein encoded by gene locus LOC_Os03g16260 of Oryza sativa.

[0388] SEQ ID NO: 363 sets forth the amino acid sequence of the eJM domain from the RLK protein encoded by gene locus AT3g59350 of Arabidopsis thaliana.

[0389] SEQ ID NO: 364 sets forth the amino acid sequence of the eJM domain from the RLK protein (WAK1) encoded by gene locus AT1G21250 of Arabidopsis thaliana.

[0390] SEQ ID NO: 365 sets forth the amino acid sequence of the eJM domain from the RLK protein encoded by gene locus Solyc09g015240.1 of Solanum lycopersicum.

[0391] SEQ ID NO: 366 sets forth the amino acid sequence of the eJM domain from the RLK protein encoded by gene locus AT5G07150 of Arabidopsis thaliana.

[0392] SEQ ID NO: 367 sets forth the amino acid sequence of the eJM domain from the RLK protein encoded by gene locus AT2G31880 of Arabidopsis thaliana. AT2G31880 is the locus that encodes AtSOBIR1. The full-length AtSOBIR1 amino acid sequence is set forth in SEQ ID NO: 8.

[0393] SEQ ID NO: 368 sets forth the amino acid sequence of the eJM domain from the RLK protein encoded by gene locus LOC_Os01g04409 of Oryza sativa.

[0394] SEQ ID NO: 369 sets forth the amino acid sequence of the eJM domain from the RLK protein encoded by gene locus LOC_Os01g49614 of Oryza sativa.

[0395] SEQ ID NO: 370 sets forth the amino acid sequence of the eJM domain from the RLK protein encoded by gene locus AT3G51550 of Arabidopsis thaliana.

[0396] SEQ ID NO: 371 sets forth the amino acid sequence of the eJM domain from the RLK protein encoded by gene locus Solyc01g104050.2 of Solanum lycopersicum.

[0397] SEQ ID NO: 372 sets forth the amino acid sequence of the eJM domain from the RLK protein encoded by gene locus LOC_Os08g01830 of Oryza sativa.

[0398] SEQ ID NO: 373 sets forth the amino acid sequence of the eJM domain from the RLK protein encoded by gene locus AT1G66980 of Arabidopsis thaliana.

[0399] SEQ ID NO: 374 sets forth the amino acid sequence of the eJM domain from the RLK protein encoded by gene locus AT5G38210 of Arabidopsis thaliana.

[0400] SEQ ID NO: 375 sets forth the amino acid sequence of the eJM domain from the RLK protein encoded by gene locus Medtr1g105650 of Medicago truncatula.

[0401] SEQ ID NO: 376 sets forth the amino acid sequence of the eJM domain from the RLK protein encoded by gene locus AT4G23190 of Arabidopsis thaliana.

[0402] SEQ ID NO: 377 sets forth the amino acid sequence of the eJM domain from the RLK protein encoded by gene locus LOC_Os07g35310 of Oryza sativa.

[0403] SEQ ID NO: 378 sets forth the amino acid sequence of the eJM domain from the RLK protein encoded by gene locus LOC_Os01g45520 of Oryza sativa.

[0404] SEQ ID NO: 379 sets forth the amino acid sequence of the eJM domain from the RLK protein encoded by gene locus Medtr1g082580 of Medicago truncatula.

[0405] SEQ ID NO: 380 sets forth the amino acid sequence of the eJM domain from the RLK protein encoded by gene locus AT2G45340 of Arabidopsis thaliana.

[0406] SEQ ID NO: 381 sets forth the amino acid sequence of the eJM domain from the RLK protein encoded by gene locus Solyc01g091230.2 of Solanum lycopersicum.

[0407] SEQ ID NO: 382 sets forth the amino acid sequence of the eJM domain from the RLK protein encoded by gene locus LOC_Os06g04370 of Oryza sativa.

[0408] SEQ ID NO: 383 sets forth the amino acid sequence of the eJM domain from the RLK protein encoded by gene locus Medtr6g060230 of Medicago truncatula.

[0409] SEQ ID NO: 384 sets forth the amino acid sequence of the eJM domain from the RLK protein encoded by gene locus Solyc03g121230.2 of Solanum lycopersicum.

[0410] SEQ ID NO: 385 sets forth the amino acid sequence of the eJM domain from the RLK protein encoded by gene locus Solyc02g079590.2 of Solanum lycopersicum.

[0411] SEQ ID NO: 386 sets forth the amino acid sequence of the eJM domain from the RLK protein encoded by gene locus AT1g80640 of Arabidopsis thaliana.

[0412] SEQ ID NO: 387 sets forth the amino acid sequence of the eJM domain from the RLK protein encoded by gene locus AT3G59700 of Arabidopsis thaliana.

[0413] SEQ ID NO: 388 sets forth the amino acid sequence of the eJM domain from the RLK protein encoded by gene locus LOC_Os03g18370 of Oryza sativa.

[0414] SEQ ID NO: 389 sets forth the amino acid sequence of the eJM domain from the RLK protein encoded by gene locus AT5G38280 of Arabidopsis thaliana.

[0415] SEQ ID NO: 390 sets forth the amino acid sequence of the eJM domain from the RLK protein encoded by gene locus Solyc07g039340.2 of Solanum lycopersicum.

[0416] Each of SEQ ID NOS: 391-540, 548-553, and 567-569 sets forth the amino acid sequence of transmembrane (TM) domain from a plant receptor-like kinases (RLK) from Arabidopsis thaliana, Medicago truncatula, Oryza sativa, or Solanum lycopersicum that can be used in the methods and compositions of present invention as described elsewhere herein. In the following descriptions for each of these sequences, the RLK subgroup (if assigned or otherwise known) and the plant species from which each sequence the RLK was derived is provided in parentheses.

[0417] SEQ ID NO: 391 sets forth the amino acid sequence of the TM domain from the RLK protein encoded by gene locus LOC_Os09g17630 of Oryza sativa.

[0418] SEQ ID NO: 392 sets forth the amino acid sequence of the TM domain from the RLK protein encoded by gene locus Solyc01g094830.2v2 of Solanum lycopersicum.

[0419] SEQ ID NO: 393 sets forth the amino acid sequence of the TM domain from the RLK protein encoded by gene locus AT2G26330 of Arabidopsis thaliana.

[0420] SEQ ID NO: 394 sets forth the amino acid sequence of the TM domain from the RLK protein encoded by gene locus Solyc08g061560.2 of Solanum lycopersicum.

[0421] SEQ ID NO: 395 sets forth the amino acid sequence of the TM domain from the RLK protein encoded by gene locus Medtr3g080050 of Medicago truncatula.

[0422] SEQ ID NO: 396 sets forth the amino acid sequence of the TM domain from the RLK protein encoded by gene locus Medtr7g062990 of Medicago truncatula.

[0423] SEQ ID NO: 397 sets forth the amino acid sequence of the TM domain from the RLK protein encoded by gene locus LOC_Os07g03830 of Oryza sativa.

[0424] SEQ ID NO: 398 sets forth the amino acid sequence of the TM domain from the RLK protein encoded by gene locus Solyc11g072140.1 of Solanum lycopersicum.

[0425] SEQ ID NO: 399 sets forth the amino acid sequence of the TM domain from the RLK protein encoded by gene locus LOC_Os04g51040 of Oryza sativa.

[0426] SEQ ID NO: 400 sets forth the amino acid sequence of the TM domain from the RLK protein encoded by gene locus Solyc04g039730.2 of Solanum lycopersicum.

[0427] SEQ ID NO: 401 sets forth the amino acid sequence of the TM domain from the RLK protein encoded by gene locus Medtr3g071480 of Medicago truncatula.

[0428] SEQ ID NO: 402 sets forth the amino acid sequence of the TM domain from the RLK protein encoded by gene locus AT2G40270 of Arabidopsis thaliana.

[0429] SEQ ID NO: 403 sets forth the amino acid sequence of the TM domain from the RLK protein encoded by gene locus Medtr4g091670 of Medicago truncatula.

[0430] SEQ ID NO: 404 sets forth the amino acid sequence of the TM domain from the RLK protein encoded by gene locus Solyc09g015240.1 of Solanum lycopersicum.

[0431] SEQ ID NO: 405 sets forth the amino acid sequence of the TM domain from the RLK protein encoded by gene locus LOC_Os03g50450 of Oryza sativa.

[0432] SEQ ID NO: 406 sets forth the amino acid sequence of the TM domain from the RLK protein encoded by gene locus Medtr8g107470 of Medicago truncatula.

[0433] SEQ ID NO: 407 sets forth the amino acid sequence of the TM domain from the RLK protein encoded by gene locus AT1G48480 of Arabidopsis thaliana.

[0434] SEQ ID NO: 408 sets forth the amino acid sequence of the TM domain from the RLK protein encoded by gene locus Solyc03g118510.2 of Solanum lycopersicum.

[0435] SEQ ID NO: 409 sets forth the amino acid sequence of the TM domain from the RLK protein encoded by gene locus AT3G21630 of Arabidopsis thaliana.

[0436] SEQ ID NO: 410 sets forth the amino acid sequence of the TM domain from the RLK protein encoded by gene locus LOC_Os01g04409 of Oryza sativa.

[0437] SEQ ID NO: 411 sets forth the amino acid sequence of the TM domain from the RLK protein encoded by gene locus AT1G65790 of Arabidopsis thaliana.

[0438] SEQ ID NO: 412 sets forth the amino acid sequence of the TM domain from the RLK protein encoded by gene locus Solyc10g051330.1 of Solanum lycopersicum.

[0439] SEQ ID NO: 413 sets forth the amino acid sequence of the TM domain from the RLK protein encoded by gene locus LOC_Os04g51050 of Oryza sativa.

[0440] SEQ ID NO: 414 sets forth the amino acid sequence of the TM domain from the RLK protein encoded by gene locus AT3G47090 of Arabidopsis thaliana.

[0441] SEQ ID NO: 415 sets forth the amino acid sequence of the TM domain from the RLK protein encoded by gene locus AT5G20480 of Arabidopsis thaliana. AT5G20480 is the locus that encodes AtEFR. The full-length AtEFR amino acid sequence is set forth in SEQ ID NO: 6.

[0442] SEQ ID NO: 416 sets forth the amino acid sequence of the TM domain from the RLK protein encoded by gene locus Medtr7g082470v2 of Medicago truncatula.

[0443] SEQ ID NO: 417 sets forth the amino acid sequence of the TM domain from the RLK protein encoded by gene locus Medtr6g088610 of Medicago truncatula.

[0444] SEQ ID NO: 418 sets forth the amino acid sequence of the TM domain from the RLK protein encoded by gene locus AT3G24550 of Arabidopsis thaliana.

[0445] SEQ ID NO: 419 sets forth the amino acid sequence of the TM domain from the RLK protein encoded by gene locus Solyc12g007110.1 of Solanum lycopersicum.

[0446] SEQ ID NO: 420 sets forth the amino acid sequence of the TM domain from the RLK protein encoded by gene locus LOC_Os05g12680 of Oryza sativa.

[0447] SEQ ID NO: 421 sets forth the amino acid sequence of the TM domain from the RLK protein encoded by gene locus LOC_Os07g36780 of Oryza sativa.

[0448] SEQ ID NO: 422 sets forth the amino acid sequence of the TM domain from the RLK protein encoded by gene locus LOC_Os03g18370 of Oryza sativa.

[0449] SEQ ID NO: 423 sets forth the amino acid sequence of the TM domain from the RLK protein encoded by gene locus Solyc01g079340.2 of Solanum lycopersicum.

[0450] SEQ ID NO: 424 sets forth the amino acid sequence of the TM domain from the RLK protein encoded by gene locus AT4G02010v2 of Arabidopsis thaliana.

[0451] SEQ ID NO: 425 sets forth the amino acid sequence of the TM domain from the RLK protein encoded by gene locus Medtr7g109670 of Medicago truncatula.

[0452] SEQ ID NO: 426 sets forth the amino acid sequence of the TM domain from the RLK protein encoded by gene locus LOC_Os01g14932 of Oryza sativa.

[0453] SEQ ID NO: 427 sets forth the amino acid sequence of the TM domain from the RLK protein encoded by gene locus Solyc06g051030.2 of Solanum lycopersicum.

[0454] SEQ ID NO: 428 sets forth the amino acid sequence of the TM domain from the RLK protein encoded by gene locus LOC_Os03g51440 of Oryza sativa.

[0455] SEQ ID NO: 429 sets forth the amino acid sequence of the TM domain from the RLK protein encoded by gene locus Solyc10g047140.1 of Solanum lycopersicum.

[0456] SEQ ID NO: 430 sets forth the amino acid sequence of the TM domain from the RLK protein encoded by gene locus AT4G33430.1 of Arabidopsis thaliana.

[0457] SEQ ID NO: 431 sets forth the amino acid sequence of the TM domain from the RLK protein encoded by gene locus Medtr2g008360 of Medicago truncatula.

[0458] SEQ ID NO: 432 sets forth the amino acid sequence of the TM domain from the RLK protein encoded by gene locus LOC_Os08g07760 of Oryza sativa.

[0459] SEQ ID NO: 433 sets forth the amino acid sequence of the TM domain from the RLK protein encoded by gene locus LOC_Os08g42580 of Oryza sativa.

[0460] SEQ ID NO: 434 sets forth the amino acid sequence of the TM domain from the RLK protein encoded by gene locus LOC_Os05g40770 of Oryza sativa.

[0461] SEQ ID NO: 435 sets forth the amino acid sequence of the TM domain from the RLK protein encoded by gene locus AT3G51550 of Arabidopsis thaliana.

[0462] SEQ ID NO: 436 sets forth the amino acid sequence of the TM domain from the RLK protein encoded by gene locus LOC_Os03g21540 of Oryza sativa.

[0463] SEQ ID NO: 437 sets forth the amino acid sequence of the TM domain from the RLK protein encoded by gene locus Solyc07g049180.2 of Solanum lycopersicum.

[0464] SEQ ID NO: 438 sets forth the amino acid sequence of the TM domain from the RLK protein encoded by gene locus Medtr7g073660 of Medicago truncatula.

[0465] SEQ ID NO: 439 sets forth the amino acid sequence of the TM domain from the RLK protein encoded by gene locus LOC_Os03g50810 of Oryza sativa.

[0466] SEQ ID NO: 440 sets forth the amino acid sequence of the TM domain from the RLK protein encoded by gene locus Solyc11g006040.1 of Solanum lycopersicum.

[0467] SEQ ID NO: 441 sets forth the amino acid sequence of the TM domain from the RLK protein encoded by gene locus Medtr5g077430 of Medicago truncatula.

[0468] SEQ ID NO: 442 sets forth the amino acid sequence of the TM domain from the RLK protein encoded by gene locus AT1G66150 of Arabidopsis thaliana.

[0469] SEQ ID NO: 443 sets forth the amino acid sequence of the TM domain from the RLK protein encoded by gene locus Medtr3g062590 of Medicago truncatula.

[0470] SEQ ID NO: 444 sets forth the amino acid sequence of the TM domain from the RLK protein encoded by gene locus LOC_Os01g72990 of Oryza sativa.

[0471] SEQ ID NO: 445 sets forth the amino acid sequence of the TM domain from the RLK protein encoded by gene locus Medtr4g070970 of Medicago truncatula.

[0472] SEQ ID NO: 446 sets forth the amino acid sequence of the TM domain from the RLK protein encoded by gene locus LOC_Os08g01830 of Oryza sativa.

[0473] SEQ ID NO: 447 sets forth the amino acid sequence of the TM domain from the RLK protein encoded by gene locus LOC_Os03g16260 of Oryza sativa.

[0474] SEQ ID NO: 448 sets forth the amino acid sequence of the TM domain from the RLK protein encoded by gene locus AT1G66980 of Arabidopsis thaliana.

[0475] SEQ ID NO: 449 sets forth the amino acid sequence of the TM domain from the RLK protein encoded by gene locus LOC_Os12g10740 of Oryza sativa.

[0476] SEQ ID NO: 450 sets forth the amino acid sequence of the TM domain from the RLK protein encoded by gene locus Medtr2g075010 of Medicago truncatula.

[0477] SEQ ID NO: 451 sets forth the amino acid sequence of the TM domain from the RLK protein encoded by gene locus Solyc12g014350.1 of Solanum lycopersicum.

[0478] SEQ ID NO: 452 sets forth the amino acid sequence of the TM domain from the RLK protein encoded by gene locus AT3G14840 of Arabidopsis thaliana.

[0479] SEQ ID NO: 453 sets forth the amino acid sequence of the TM domain from the RLK protein encoded by gene locus Medtr0280s0040 of Medicago truncatula.

[0480] SEQ ID NO: 454 sets forth the amino acid sequence of the TM domain from the RLK protein encoded by gene locus Solyc03g123740.2 of Solanum lycopersicum.

[0481] SEQ ID NO: 455 sets forth the amino acid sequence of the TM domain from the RLK protein encoded by gene locus LOC_Os03g08550 of Oryza sativa.

[0482] SEQ ID NO: 456 sets forth the amino acid sequence of the TM domain from the RLK protein encoded by gene locus Medtr7g117520 of Medicago truncatula.

[0483] SEQ ID NO: 457 sets forth the amino acid sequence of the TM domain from the RLK protein encoded by gene locus AT1G53730 of Arabidopsis thaliana.

[0484] SEQ ID NO: 458 sets forth the amino acid sequence of the TM domain from the RLK protein encoded by gene locus AT5G07150 of Arabidopsis thaliana.

[0485] SEQ ID NO: 459 sets forth the amino acid sequence of the TM domain from the RLK protein encoded by gene locus Solyc01g104050.2 of Solanum lycopersicum.

[0486] SEQ ID NO: 460 sets forth the amino acid sequence of the TM domain from the RLK protein encoded by gene locus Medtr2g006910 of Medicago truncatula.

[0487] SEQ ID NO: 461 sets forth the amino acid sequence of the TM domain from the RLK protein encoded by gene locus AT1G11050 of Arabidopsis thaliana.

[0488] SEQ ID NO: 462 sets forth the amino acid sequence of the TM domain from the RLK protein encoded by gene locus Solyc03g119240.2 of Solanum lycopersicum.

[0489] SEQ ID NO: 463 sets forth the amino acid sequence of the TM domain from the RLK protein encoded by gene locus Medtr3g075440 of Medicago truncatula.

[0490] SEQ ID NO: 464 sets forth the amino acid sequence of the TM domain from the RLK protein encoded by gene locus AT2G31880 of Arabidopsis thaliana. AT2G31880 is the locus that encodes AtSOBIR1. The full-length AtSOBIR1 amino acid sequence is set forth in SEQ ID NO: 8.

[0491] SEQ ID NO: 465 sets forth the amino acid sequence of the TM domain from the RLK protein encoded by gene locus LOC_Os06g1800 of Oryza sativa.

[0492] SEQ ID NO: 466 sets forth the amino acid sequence of the TM domain from the RLK protein encoded by gene locus Solyc06g071810.1 of Solanum lycopersicum.

[0493] SEQ ID NO: 467 sets forth the amino acid sequence of the TM domain from the RLK protein encoded by gene locus AT3G59700 of Arabidopsis thaliana.

[0494] SEQ ID NO: 468 sets forth the amino acid sequence of the TM domain from the RLK protein encoded by gene locus AT1G18390v2 of Arabidopsis thaliana.

[0495] SEQ ID NO: 469 sets forth the amino acid sequence of the TM domain from the RLK protein encoded by gene locus AT5G38210v2 of Arabidopsis thaliana.

[0496] SEQ ID NO: 470 sets forth the amino acid sequence of the TM domain from the RLK protein encoded by gene locus Medtr8g070880 of Medicago truncatula.

[0497] SEQ ID NO: 471 sets forth the amino acid sequence of the TM domain from the RLK protein encoded by gene locus Medtr7g092050 of Medicago truncatula.

[0498] SEQ ID NO: 472 sets forth the amino acid sequence of the TM domain from the RLK protein encoded by gene locus AT2G41890 of Arabidopsis thaliana.

[0499] SEQ ID NO: 473 sets forth the amino acid sequence of the TM domain from the RLK protein encoded by gene locus Medtr1g105650 of Medicago truncatula.

[0500] SEQ ID NO: 474 sets forth the amino acid sequence of the TM domain from the RLK protein encoded by gene locus LOC_Os03g35600 of Oryza sativa.

[0501] SEQ ID NO: 475 sets forth the amino acid sequence of the TM domain from the RLK protein encoded by gene locus Solyc03g121230.2 of Solanum lycopersicum.

[0502] SEQ ID NO: 476 sets forth the amino acid sequence of the TM domain from the RLK protein encoded by gene locus Medtr5g044680 of Medicago truncatula.

[0503] SEQ ID NO: 477 sets forth the amino acid sequence of the TM domain from the RLK protein encoded by gene locus Medtr5g019070v2 of Medicago truncatula.

[0504] SEQ ID NO: 478 sets forth the amino acid sequence of the TM domain from the RLK protein encoded by gene locus Solyc02g080040.2 of Solanum lycopersicum.

[0505] SEQ ID NO: 479 sets forth the amino acid sequence of the TM domain from the RLK protein encoded by gene locus AT4G23190 of Arabidopsis thaliana.

[0506] SEQ ID NO: 480 sets forth the amino acid sequence of the TM domain from the RLK protein encoded by gene locus Solyc07g055180.2 of Solanum lycopersicum.

[0507] SEQ ID NO: 481 sets forth the amino acid sequence of the TM domain from the RLK protein encoded by gene locus Medtr2g084120 of Medicago truncatula.

[0508] SEQ ID NO: 482 sets forth the amino acid sequence of the TM domain from the RLK protein encoded by gene locus LOC_Os05g11750 of Oryza sativa.

[0509] SEQ ID NO: 483 sets forth the amino acid sequence of the TM domain from the RLK protein encoded by gene locus AT1G66930v2 of Arabidopsis thaliana.

[0510] SEQ ID NO: 484 sets forth the amino acid sequence of the TM domain from the RLK protein encoded by gene locus LOC_Os05g34950 of Oryza sativa.

[0511] SEQ ID NO: 485 sets forth the amino acid sequence of the TM domain from the RLK protein encoded by gene locus AT3g59350 of Arabidopsis thaliana.

[0512] SEQ ID NO: 486 sets forth the amino acid sequence of the TM domain from the RLK protein encoded by gene locus AT3G08870 of Arabidopsis thaliana.

[0513] SEQ ID NO: 487 sets forth the amino acid sequence of the TM domain from the RLK protein encoded by gene locus Medtr8g015340 of Medicago truncatula.

[0514] SEQ ID NO: 488 sets forth the amino acid sequence of the TM domain from the RLK protein encoded by gene locus LOC_Os12g42520 of Oryza sativa.

[0515] SEQ ID NO: 489 sets forth the amino acid sequence of the TM domain from the RLK protein encoded by gene locus Solyc03g019980.1v2 of Solanum lycopersicum.

[0516] SEQ ID NO: 490 sets forth the amino acid sequence of the TM domain from the RLK protein encoded by gene locus LOC_Os09g12240 of Oryza sativa.

[0517] SEQ ID NO: 491 sets forth the amino acid sequence of the TM domain from the RLK protein encoded by gene locus OsXa21 of Oryza sativa.

[0518] SEQ ID NO: 492 sets forth the amino acid sequence of the TM domain from the RLK protein encoded by gene locus Medtr1g064560 of Medicago truncatula.

[0519] SEQ ID NO: 493 sets forth the amino acid sequence of the TM domain from the RLK protein encoded by gene locus Solyc06g076910.1 of Solanum lycopersicum.

[0520] SEQ ID NO: 494 sets forth the amino acid sequence of the TM domain from the RLK protein encoded by gene locus LOC_Os07g35310 of Oryza sativa.

[0521] SEQ ID NO: 495 sets forth the amino acid sequence of the TM domain from the RLK protein encoded by gene locus AT1G75820 of Arabidopsis thaliana.

[0522] SEQ ID NO: 496 sets forth the amino acid sequence of the TM domain from the RLK protein encoded by gene locus AT5G38280 of Arabidopsis thaliana.

[0523] SEQ ID NO: 497 sets forth the amino acid sequence of the TM domain from the RLK protein encoded by gene locus Medtr4g085810 of Medicago truncatula.

[0524] SEQ ID NO: 498 sets forth the amino acid sequence of the TM domain from the RLK protein encoded by gene locus AT1g49730 of Arabidopsis thaliana.

[0525] SEQ ID NO: 499 sets forth the amino acid sequence of the TM domain from the RLK protein encoded by gene locus Solyc01g108000.2 of Solanum lycopersicum.

[0526] SEQ ID NO: 500 sets forth the amino acid sequence of the TM domain from the RLK protein encoded by gene locus LOC_Os04g59320 of Oryza sativa.

[0527] SEQ ID NO: 501 sets forth the amino acid sequence of the TM domain from the RLK protein encoded by gene locus AT3G46420 of Arabidopsis thaliana.

[0528] SEQ ID NO: 502 sets forth the amino acid sequence of the TM domain from the RLK protein encoded by gene locus LOC_Os01g45520 of Oryza sativa.

[0529] SEQ ID NO: 503 sets forth the amino acid sequence of the TM domain from the RLK protein encoded by gene locus Medtr2g043380 of Medicago truncatula.

[0530] SEQ ID NO: 504 sets forth the amino acid sequence of the TM domain from the RLK protein encoded by gene locus Solyc02g068370.2 of Solanum lycopersicum.

[0531] SEQ ID NO: 505 sets forth the amino acid sequence of the TM domain from the RLK protein encoded by gene locus LOC_Os01g01410 of Oryza sativa.

[0532] SEQ ID NO: 506 sets forth the amino acid sequence of the TM domain from the RLK protein encoded by gene locus AT1G52310 of Arabidopsis thaliana.

[0533] SEQ ID NO: 507 sets forth the amino acid sequence of the TM domain from the RLK protein encoded by gene locus AT4G00340 of Arabidopsis thaliana.

[0534] SEQ ID NO: 508 sets forth the amino acid sequence of the TM domain from the RLK protein encoded by gene locus Medtr3g116640 of Medicago truncatula.

[0535] SEQ ID NO: 509 sets forth the amino acid sequence of the TM domain from the RLK protein encoded by gene locus Solyc01g109650.2 of Solanum lycopersicum.

[0536] SEQ ID NO: 510 sets forth the amino acid sequence of the TM domain from the RLK protein encoded by gene locus AT2G16250 of Arabidopsis thaliana.

[0537] SEQ ID NO: 511 sets forth the amino acid sequence of the TM domain from the RLK protein encoded by gene locus AT1g80640 of Arabidopsis thaliana.

[0538] SEQ ID NO: 512 sets forth the amino acid sequence of the TM domain from the RLK protein (WAK1) encoded by gene locus AT1G21250 of Arabidopsis thaliana.

[0539] SEQ ID NO: 513 sets forth the amino acid sequence of the TM domain from the RLK protein encoded by gene locus Solyc04g051510.1 of Solanum lycopersicum.

[0540] SEQ ID NO: 514 sets forth the amino acid sequence of the TM domain from the RLK protein encoded by gene locus Medtr3g095100 of Medicago truncatula.

[0541] SEQ ID NO: 515 sets forth the amino acid sequence of the TM domain from the RLK protein encoded by gene locus AT4G39400 of Arabidopsis thaliana.

[0542] SEQ ID NO: 516 sets forth the amino acid sequence of the TM domain from the RLK protein encoded by gene locus Solyc09g007750.2 of Solanum lycopersicum.

[0543] SEQ ID NO: 517 sets forth the amino acid sequence of the TM domain from the RLK protein encoded by gene locus AT2G39180 of Arabidopsis thaliana.

[0544] SEQ ID NO: 518 sets forth the amino acid sequence of the TM domain from the RLK protein encoded by gene locus LOC_Os01g49614 of Oryza sativa.

[0545] SEQ ID NO: 519 sets forth the amino acid sequence of the TM domain from the RLK protein encoded by gene locus Solyc05g053010.1 of Solanum lycopersicum.

[0546] SEQ ID NO: 520 sets forth the amino acid sequence of the TM domain from the RLK protein encoded by gene locus ospi03g56270 of Oryza sativa.

[0547] SEQ ID NO: 521 sets forth the amino acid sequence of the TM domain from the RLK protein encoded by gene locus Solyc01g091230.2 of Solanum lycopersicum.

[0548] SEQ ID NO: 522 sets forth the amino acid sequence of the TM domain from the RLK protein encoded by gene locus AT2G45340 of Arabidopsis thaliana.

[0549] SEQ ID NO: 523 sets forth the amino acid sequence of the TM domain from the RLK protein encoded by gene locus Medtr8g030500 of Medicago truncatula.

[0550] SEQ ID NO: 524 sets forth the amino acid sequence of the TM domain from the RLK protein encoded by gene locus LOC_Os06g04370 of Oryza sativa.

[0551] SEQ ID NO: 525 sets forth the amino acid sequence of the TM domain from the RLK protein encoded by gene locus Medtr2g039290 of Medicago truncatula.

[0552] SEQ ID NO: 526 sets forth the amino acid sequence of the TM domain from the RLK protein encoded by gene locus LOC_Os01g51290 of Oryza sativa.

[0553] SEQ ID NO: 527 sets forth the amino acid sequence of the TM domain from the RLK protein encoded by gene locus AT5G56890 of Arabidopsis thaliana.

[0554] SEQ ID NO: 528 sets forth the amino acid sequence of the TM domain from the RLK protein encoded by gene locus Solyc07g039340.2 of Solanum lycopersicum.

[0555] SEQ ID NO: 529 sets forth the amino acid sequence of the TM domain from the RLK protein encoded by gene locus Solyc09g098290.2 of Solanum lycopersicum.

[0556] SEQ ID NO: 530 sets forth the amino acid sequence of the TM domain from the RLK protein encoded by gene locus AT3G28040 of Arabidopsis thaliana.

[0557] SEQ ID NO: 531 sets forth the amino acid sequence of the TM domain from the RLK protein encoded by gene locus LOC_Os01g72700 of Oryza sativa.

[0558] SEQ ID NO: 532 sets forth the amino acid sequence of the TM domain from the RLK protein encoded by gene locus Medtr7g022160v2 of Medicago truncatula.

[0559] SEQ ID NO: 533 sets forth the amino acid sequence of the TM domain from the RLK protein encoded by gene locus Solyc02g086210.2 of Solanum lycopersicum.

[0560] SEQ ID NO: 534 sets forth the amino acid sequence of the TM domain from the RLK protein encoded by gene locus Medtr6g060230 of Medicago truncatula.

[0561] SEQ ID NO: 535 sets forth the amino acid sequence of the TM domain from the RLK protein encoded by gene locus LOC_Os05g44970 of Oryza sativa.

[0562] SEQ ID NO: 536 sets forth the amino acid sequence of the TM domain from the RLK protein encoded by gene locus Solyc04g081590.2 of Solanum lycopersicum.

[0563] SEQ ID NO: 537 sets forth the amino acid sequence of the TM domain from the RLK protein encoded by gene locus Medtr1g082580 of Medicago truncatula.

[0564] SEQ ID NO: 538 sets forth the amino acid sequence of the TM domain from the RLK protein encoded by gene locus Solyc03g063650.1 of Solanum lycopersicum.

[0565] SEQ ID NO: 539 sets forth the amino acid sequence of the TM domain from the RLK protein encoded by gene locus LOC_Os05g33080 of Oryza sativa.

[0566] SEQ ID NO: 540 sets forth the amino acid sequence of the TM domain from the RLK protein encoded by gene locus Solyc02g079590.2 of Solanum lycopersicum.

[0567] SEQ ID NO: 541 sets forth the amino acid sequence of the synthetic eJM domain, referred to herein as eJM(EEEE/ADQ−).

[0568] SEQ ID NO: 542 sets forth the amino acid sequence of the eJM domain from AtRLP1 of Arabidopsis thaliana.

[0569] SEQ ID NO: 543 sets forth the amino acid sequence of the eJM domain from AtRLP23 of Arabidopsis thaliana.

[0570] SEQ ID NO: 544 sets forth the amino acid sequence of the eJM domain from AtRLP30 of Arabidopsis thaliana.

[0571] SEQ ID NO: 545 sets forth the amino acid sequence of the eJM domain from AtRLP42 of Arabidopsis thaliana.

[0572] SEQ ID NO: 546 sets forth the amino acid sequence of the eJM domain from Cf-4 of Solanum lycopersicum.

[0573] SEQ ID NO: 547 sets forth the amino acid sequence of the eJM domain from Ve1 of Solanum lycopersicum.

[0574] SEQ ID NO: 548 sets forth the amino acid sequence of the TM domain from AtRLP1 of Arabidopsis thaliana.

[0575] SEQ ID NO: 549 sets forth the amino acid sequence of the TM domain from AtRLP23 of Arabidopsis thaliana.

[0576] SEQ ID NO: 550 sets forth the amino acid sequence of the TM domain from AtRLP30 of Arabidopsis thaliana.

[0577] SEQ ID NO: 551 sets forth the amino acid sequence of the TM domain from AtRLP42 of Arabidopsis thaliana.

[0578] SEQ ID NO: 552 sets forth the amino acid sequence of the TM domain from Cf-4 of Solanum lycopersicum.

[0579] SEQ ID NO: 553 sets forth the amino acid sequence of the TM domain from Ve1 of Solanum lycopersicum.

[0580] SEQ ID NO: 554 sets forth the amino acid sequence of the SP domain from AtRLP1 of Arabidopsis thaliana.

[0581] SEQ ID NO: 555 sets forth the amino acid sequence of the SP domain from AtRLP23 of Arabidopsis thaliana.

[0582] SEQ ID NO: 556 sets forth the amino acid sequence of the SP domain from AtRLP30 of Arabidopsis thaliana.

[0583] SEQ ID NO: 557 sets forth the amino acid sequence of the SP domain from AtRLP42 of Arabidopsis thaliana.

[0584] SEQ ID NO: 558 sets forth the amino acid sequence of the SP domain from Cf-4 of Solanum lycopersicum.

[0585] SEQ ID NO: 559 sets forth the amino acid sequence of the SP domain from Ve1 of Solanum lycopersicum.

[0586] SEQ ID NO: 560 sets forth an amino acid sequence comprising the amino acid sequence of the LRR domain from AtRLP23 of Arabidopsis thaliana.

[0587] SEQ ID NO: 561 sets forth the amino acid sequence of the kinase domain from the RLK protein (OsPi-d2) encoded by gene locus LOC_Os06g29810v2 (Oryza sativa).

[0588] SEQ ID NO: 562 sets forth the amino acid sequence of the kinase domain from the RLK protein (AtPEPR1) encoded by gene locus AT1G73080 (Arabidopsis thaliana).

[0589] SEQ ID NO: 563 sets forth the amino acid sequence of the kinase domain from the RLK protein (AtLYK5) encoded by gene locus AT2G33580 (Arabidopsis thaliana).

[0590] SEQ ID NO: 564 sets forth the amino acid sequence of the eJM domain from the RLK protein (OsPi-d2) encoded by gene locus LOC_Os06g29810v2 (Oryza sativa).

[0591] SEQ ID NO: 565 sets forth the amino acid sequence of the eJM domain from the RLK protein (AtPEPR1) encoded by gene locus AT1G73080 (Arabidopsis thaliana).

[0592] SEQ ID NO: 566 sets forth the amino acid sequence of the eJM domain from the RLK protein (AtLYK5) encoded by gene locus AT2G33580 (Arabidopsis thaliana).

[0593] SEQ ID NO: 567 sets forth the amino acid sequence of the TM domain from the RLK protein (OsPi-d2) encoded by gene locus LOC_Os06g29810v2 (Oryza sativa).

[0594] SEQ ID NO: 568 sets forth the amino acid sequence of the TM domain from the RLK protein (AtPEPR1) encoded by gene locus AT1G73080 (Arabidopsis thaliana).

[0595] SEQ ID NO: 569 sets forth the amino acid sequence of the TM domain from the RLK protein (AtLYK5) encoded by gene locus AT2G33580 (Arabidopsis thaliana).

[0596] SEQ ID NO: 570 sets forth the nucleotide sequence of the AtRLP23-AtPEPR1 polynucleotide construct. The construct comprises a first nucleotide sequence encoding the apoplastic and eJM domains of AtRLP23 (nucleotides 1-2550), operably linked to a second nucleotide sequence comprising a coding sequence for the AtPEPR1 TM domain and kinase domain (nucleotides 2551-3612). If desired, a stop codon (e.g. TAA, TAG, or TGA) can be operably linked to the 3′ end of a nucleic acid molecule comprising SEQ ID NO: 570.

[0597] SEQ ID NO: 571 sets forth the amino acid sequence of AtRLP23-AtPEPR1 protein encoded by SEQ ID NO: 19. The AtRLP23-AtPEPR1 protein comprises a first polypeptide comprising the AtRLP23 apoplastic and eJM domains (amino acids 1-850), operably linked to a second polypeptide comprising the OsXA21 TM and cytoplasmic domains (amino acids 851-1204).

[0598] SEQ ID NO: 572 sets forth the nucleotide sequence of the AtRLP23-AtPEPR1-3×FLAG polynucleotide construct. The construct comprises a first nucleotide sequence encoding the apoplastic and eJM domains of AtRLP23 (nucleotides 1-2550), operably linked to a second nucleotide sequence comprising a coding sequence for the AtPEPR1 TM domain and kinase domain (nucleotides 2551-3612), operably linked to a third nucleotide sequence encoding the 3×FLAG peptide (nucleotides 3613-3696). If desired, a stop codon (e.g. TAA, TAG, or TGA) can be operably linked to the 3′ end of a nucleic acid molecule comprising SEQ ID NO: 572. It is noted that in the Examples below, the stop codon TGA was used with this construct.

[0599] SEQ ID NO: 573 sets forth the amino acid sequence of AtRLP23-AtPEPR1-3×FLAG protein encoded by SEQ ID NO: 21. The AtRLP23-AtPEPR1-3×FLAG protein comprises a first polypeptide comprising the AtRLP23 apoplastic and eJM domains (amino acids 1-850), operably linked to a second polypeptide comprising the AtPEPR1 TM and kinase domains (amino acids 851-1204), operably linked to the 3×FLAG peptide (amino acids 1205-1232).

### DETAILED DESCRIPTION OF THE INVENTION

[0600] The present inventions now will be described more fully hereinafter with reference to the accompanying drawings, in which some, but not all embodiments of the inventions are shown. Indeed, these inventions may be embodied in many different forms and should not be construed as limited to the embodiments set forth herein; rather, these embodiments are provided so that this disclosure will satisfy applicable legal requirements. Like numbers refer to like elements throughout.

[0601] Many modifications and other embodiments of the inventions set forth herein will come to mind to one skilled in the art to which these inventions pertain having the benefit of the teachings presented in the foregoing descriptions and the associated drawings. Therefore, it is to be understood that the inventions are not to be limited to the specific embodiments disclosed and that modifications and other embodiments are intended to be included within the scope of the appended claims. Although specific terms are employed herein, they are used in a generic and descriptive sense only and not for purposes of limitation.

[0602] The present invention relates to methods for making and using engineered AtRLP23 proteins and nucleic acid molecules encoding such AtRLP23 proteins. Thus, the AtRLP23 proteins and nucleic acid molecules of the present invention are synthetic or artificial (i.e. non-naturally occurring) proteins and nucleic acid molecules. Such synthetic or artificial AtRLP23 proteins of the present invention are also referred to herein as “engineered AtRLP23 proteins”. The AtRLP23 proteins and nucleic acid molecules encoding them find use in enhancing the resistance of plants, particularly crop plants, to plant pathogens. Such crop plants with enhanced resistance to plant pathogens find use in agriculture by limiting or reducing plant disease.

[0603] The present invention further relates to compositions comprising at least one engineered AtRLP23 protein of the present invention and/or at least one nucleic acid molecule encoding such an engineered AtRLP23 protein. Such compositions include, but not limited to, plants, plant cells, and other host cells comprising one or more of such engineered AtRLP23 proteins and/or nucleic acid molecules, and expression cassettes and vectors comprising one or more of such nucleic acid molecules.

[0604] The present invention provides methods for making engineered AtRLP23 proteins comprising a leucine-rich-repeat (LRR) domain derived from a receptor-like protein (RLP) that is capable of recognizing in a plant a pathogen-associated molecular pattern (PAMP) derived from a necrosis- and ethylene-inducing protein 1 (Nep1)-like protein family of PAMPs. Nep1-like proteins (NLPs) are known to occur in bacteria, fungi, and oomycetes. While the present invention is not bound by a particular biological mechanism, it is believed that NLPs trigger plant defense responses in plants following recognition by a PRR of PAMPs derived from NLPs. Recently, the Arabidopsis RLP, AtRLP23, was identified as the PRR that recognizes the NLPs (Albert et al., 2015. Nat. Plants 1:15140, doi:10.1038/nplants.2015.140). It was shown by Albert et al. that in presence of AtRLP23, Arabidopsis plants can perceive NLP20 from Phytophthora infestans, and NLP24 peptides derived from various NLPs of Hyaloperonospora arabidopsidis (HaNLP3), Botrytis cinerea (BcNEP2), and Bacillus subtilis (BsNPP).

[0605] The methods for making engineered AtRLP23 proteins involve producing chimeric proteins comprising an LRR domain derived from AtRLP23 and a kinase domain derived from a receptor-like kinase (RLK). Such methods comprise producing a polypeptide comprising an amino acid sequence having the following domains in operable linkage and in an N-terminal-to-C-terminal direction: an LRR domain derived from an RLP that is capable of recognizing in a plant a pathogen-associated molecular pattern derived from an NLP, an extra-juxtamembrane (eJM) domain, a transmembrane (TM) domain, and a kinase domain derived from an RLK. If desired, the polypeptide can further comprise an SP domain that is operably linked to, and the N-terminal side of the LRR domain. Preferably, such an SP domain is capable of targeting a polypeptide to the plasmalemma of a plant cell when the SP domain is operably linked to the polypeptide.

[0606] It is recognized that when a polypeptide comprising an SP domain is expressed in a plant, the SP domain is typically cleaved by a signal peptidase shortly after translation. Thus, the engineered AtRLP23 proteins of the present invention include, not only the engineered AtRLP23 proteins disclosed herein comprising an SP domain, but also engineered AtRLP23 proteins lacking an SP domain. It is recognized that such engineered AtRLP23 proteins that do not comprise an SP domain include, for example, engineered AtRLP23 proteins that were initially synthesized in a plant cell or other host cell and comprised an SP domain that was later cleaved from the engineered AtRLP23 protein and any other engineered AtRLP23 protein lacking all or at least a part of an SP domain.

[0607] The methods of the present invention can comprise use of a domain derived from a particular protein of interest (e.g. an LRR domain derived from AtRLP23). By “derived from” it is intended that the domain has the same amino acid sequence as the native domain in the protein of interest or is a modified domain which comprises a modified amino acid sequence that is not identical to the full-length amino acid sequence of the native domain and which has the same biological function (e.g. PAMP recognition, membrane localization, kinase activity) as the native domain from the protein of interest or does not otherwise alter the biological function of the engineered AtRLP23 proteins, relative to the biological function of AtRLP23 (i.e. recognition of a PAMP derived from an NLP). Such a modified domain or variant domain is an artificial or non-naturally occurring protein domain that comprises a modified amino acid sequence and can be produced, for example, by modifying the amino acid sequence of a native domain or even two of more native domains or even my combining portions of two or more native domains. Such “modifying the amino acid sequence” comprises the substitution, addition, and/or deletion of one or more amino acids of the amino acid sequence of the native domain. Preferably, the engineered AtRLP23 proteins of the present invention are capable of recognizing in a plant a PAMP derived from an NLP and comprise increased activity or increased responsiveness when compared to the activity or responsiveness of AtRLP23 in one or more of the assays disclosed elsewhere herein or otherwise known in the art.

[0608] The engineered AtRLP23 proteins comprise an LRR domain derived from AtRLP23. In some embodiments of the invention, the LRR domain is the native LRR domain of AtRLP23 comprising the amino acid sequence set forth in SEQ ID NO: 560. In other embodiments, the LRR domain will comprise a variant AtRLP23 LRR domain that has at least about 50%, 55%, 60%, 65% 70%, 75%, 80%, 85%, 90%, 91%, 92%, 93%, 94%, 95%, 96%, 97%, 98%, 99% or more sequence identity to the amino acid sequence of the AtRLP23 LRR domain set forth in SEQ ID NO: 560. Preferably, such variants or modified AtRLP23 LRR domains will retain the biological function of the AtRLP23 LRR domain when such variants or modified AtRLP23 LRR domains are contained in an engineered AtRLP23 protein of the present invention—that is, an engineered AtRLP23 protein comprising a variant AtRLP23 LRR domain will be capable of recognizing in a plant a PAMP derived from an NLP. It is recognized that the biological function of a variant AtRLP23 LRR domain can be determined, for example, by replacing the native LRR domain of AtRLP23 with the variant LRR domain and assaying the activity or function of the chimeric protein by methods disclosed elsewhere herein.

[0609] Different kinase domains derived from RLK proteins can be used in the methods and compositions of the present invention. Examples of some RLK kinase domains that can be used in the methods and compositions of the present invention comprise the amino acid sequences set forth in SEQ ID NOS: 77-240 and 561-563, and variants thereof. In certain embodiments of the invention, an engineered AtRLP23 protein of the present invention will comprise a variant RLK kinase domain that has at least about 50%, 55%, 60%, 65% 70%, 75%, 80%, 85%, 90%, 91%, 92%, 93%, 94%, 95%, 96%, 97%, 98%, 99% or more sequence identity to one or more of the kinase domain amino acid sequences set forth in SEQ ID NOS: 77-240 and 561-563. In certain other embodiments of the invention, the kinase domain is derived from OsXA21, AtSOBIR1, AtPEPR1, or AtEFR. The amino acid sequences of the kinase domains of OsXA21, AtSOBIR1, AtPEPR1, and AtEFR are set forth in SEQ ID NOS: 113, 158, 562, and 189, respectively.

[0610] In some embodiments of the invention, the engineered AtRLP23 proteins comprise the native AtRLP23 SP, eJM, and TM domains. In other embodiments, the engineered AtRLP23 proteins comprise a polypeptide in which one or more of the SP, eJM, and TM domains is not identical to the corresponding native domain. Preferably, such non-native domains will retain the biological function of the corresponding AtRLP23 domain when such a non-native domains are contained in an engineered AtRLP23 protein of the present invention—that is, an engineered AtRLP23 protein comprising one or more of such non-native domains will be capable of recognizing in a plant a PAMP derived from an NLP. It is recognized that the biological function of a non-native SP, eJM, or TM domain can be determined, for example, by replacing the corresponding native domain of AtRLP23 with a non-native SP, eJM, or TM and assaying the activity or function of the chimeric protein by methods disclosed elsewhere herein.

[0611] The amino acid sequence of the native AtRLP23 eJM domain is set forth in SEQ ID NO: 543. Examples of some non-native eJM domains that can be used in the methods and compositions of the present invention comprise the amino acid sequences set forth in SEQ ID NOS: 241-390, 541, 542, 545-547, and 564-566, and variants thereof, and also variants of the amino acid sequence set forth in SEQ ID NO: 543. In certain embodiments of the invention, an engineered AtRLP23 protein of the present invention will comprise a variant eJM domain that has at least about 50%, 55%, 60%, 65% 70%, 75%, 80%, 85%, 90%, 91%, 92%, 93%, 94%, 95%, 96%, 97%, 98%, 99% or more sequence identity to one or more of the eJM domain amino acid sequences set forth in SEQ ID NOS: 241-390, 541-547, and 564-566. In certain other embodiments of the invention, the eJM is an eJM domain derived from an RLP, particularly a SOBIR1-dependent RLP including, but are not limited to, an eJM domain derived from AtRLP1 (SEQ ID NO: 542), AtRLP23 (SEQ ID NO: 543), AtRLP30 (SEQ ID NO: 544), AtRLP42 (SEQ ID NO: 545), Cf-4 (SEQ ID NO: 546), and/or Ve1 (SEQ ID NO: 547). While the naturally occurring versions of the eJM domain can be used in the methods and compositions, non-naturally occurring or synthetic eJM domains can be used such as, for example, eJM(EEEE/ADQ−) (SEQ ID NO: 541), which is a chimera of between the eJMs of AtRLP23 and AtRLP42 as described in Example 2 below.

[0612] As indicated above, the engineered AtRLP23 proteins produced by the methods of the present invention can comprise an SP domain and an TM domain. Preferably, the SP domain or is derived from a plasmalemma-bound protein. More preferably, the SP domain and the TM domain are each derived from a plasmalemma-bound protein. More preferably, the SP domain and the TM domain are derived from the same PRR or two different PRRs. In some preferred embodiments of the method of the invention, the SP domain is derived from AtRLP23 and the TM domain and the kinase domain are derived from AtEFR, AtPEPR1, or OsXA21. In other preferred embodiments, the SP, LRR, and TM domains are derived from AtRLP23 and the kinase domain is derived from AtSOBIR1.

[0613] The amino acid sequence of the native AtRLP23 TM domain is set forth in SEQ ID NO: 549. Examples of some non-native TM domains that can be used in the methods and compositions of the present invention comprise the amino acid sequences set forth in SEQ ID NOS: 391-540, 548, 550-553, and 567-569, and variants thereof, and also variants of the amino acid sequence set forth in SEQ ID NO: 549. In certain embodiments of the invention, an engineered AtRLP23 protein of the present invention will comprise a variant TM domain that has at least about 50%, 55%, 60%, 65% 70%, 75%, 80%, 85%, 90%, 91%, 92%, 93%, 94%, 95%, 96%, 97%, 98%, 99% or more sequence identity to one or more of the TM domain amino acid sequences set forth in SEQ ID NOS: 391-541, 548-553, and 567-569.

[0614] The amino acid sequence of the native AtRLP23 TM domain is set forth in SEQ ID NO: 555. Examples of some non-native SP domains that can be used in the methods and compositions of the present invention comprise the amino acid sequences set forth in SEQ ID NOS: 554, and 556-559 and variants thereof, and also variants of the amino acid sequence set forth in SEQ ID NO: 555. In certain embodiments of the invention, an engineered AtRLP23 protein of the present invention will comprise a variant SP domain that has at least about 50%, 55%, 60%, 65% 70%, 75%, 80%, 85%, 90%, 91%, 92%, 93%, 94%, 95%, 96%, 97%, 98%, 99% or more sequence identity to one or more of the TM domain amino acid sequences set forth in SEQ ID NOS: 554-559. Preferably, the SP domains that used in the engineered AtRLP23 proteins of the present invention are capable of targeting an operably linked engineered AtRLP23 protein to the plasmalemma of a plant cell.

[0615] Amino acid sequences encoding engineered AtRLP23 proteins produced by the methods of the present invention include, but are not limited to, the amino acid sequences set forth in SEQ ID NOS: 16, 20, 32, 40, and 60. In some embodiments of the invention, the engineered AtRLP23 proteins further comprise a 3×FLAG tag operably linked to the C-terminal end of the kinase domain. The 3×FLAG tags were added to certain of the engineered AtRLP23 proteins of the present invention to aid in detection and/or purification the engineered AtRLP23 proteins and are not believed to alter the biological function and/or membrane localization of the engineered AtRLP23 proteins. Examples of engineered AtRLP23 proteins of the present invention comprising a kinase domain and a 3×FLAG tag have the amino acid sequences set forth in SEQ ID NO: 18, 22, 34, 42, and 62.

[0616] The methods for making an engineered AtRLP23 protein comprise, or further comprise, modifying the amino acid sequence of the AtRLP23 protein whereby an engineered AtRLP23 protein is produced for which the portion of the amino acid sequence corresponding to the AtRLP23 protein (i.e. the amino acid sequence without the kinase domain and any adaptor or linker attached thereto) comprises an amino acid sequence that is not identical to the full-length amino acid sequence of AtRLP23. Such “modifying the amino acid sequence” comprises the substitution, addition, and/or deletion of one or more amino acids of amino acid sequence of the AtRLP23 protein. As noted above, a protein comprising a modified amino acid sequence is typically produced by modifying the nucleotide sequence of a nucleic acid molecule whereby a modified nucleotide sequence that encodes the desired modified amino acid sequence is produced and then by expressing the nucleotide sequence in a cell or in vitro, whereby a protein comprising the desired modified amino acid sequence is produced.

[0617] In some embodiments of the invention, the methods comprise replacing one or more of the SP, eJM, and TM domains of the AtRLP23 protein or part or parts thereof with the corresponding domain derived from another PRR or part or parts of such a corresponding domain.

[0618] In one embodiment of the invention, the engineered AtRLP23 protein comprises a modified eJM domain that is derived from the eJM domain of another RLP including, but not limited to, the native eJM domains of AtRLP1, AtRLP23, AtRLP30, AtRLP42, Cf-4, and Ve1 and modified versions thereof that do reduce the biological activity of the engineered AtRLP23 protein, relative to the activity of the AtRLP23 protein. In another embodiment of the invention, the engineered AtRLP23 protein comprises a modified eJM domain that is derived from the eJM domains of two or more PRRs. An example of such an engineered AtRLP23 protein is the AtRLP23-eJM(EEEE/ADQ−) protein (SEQ ID NO: 44) which comprises the modified eJM domain referred to herein as eJM(EEEE/ADQ−) (SEQ ID NO: 541) and which is described further in Example 2 below.

[0619] It is recognized that in making the engineered AtRLP23 proteins, it may be desirable or necessary to add adapters or linkers between any one or more of the various domains of such proteins to maintain or improve the biological activity or function of the engineered protein, relative to such an engineered protein lacking such an adaptor or linker. Such adapters or linkers may be employed to prohibit unwanted interactions between the discrete domains in a protein. Such adaptors or linkers can be oligopeptides (i.e. 2-20 amino acids), but in some situations, the adaptors and linkers can be relatively short polypeptides are between about 21 and 50 amino acids in length, preferably between 21-31 amino acids.

[0620] The methods of the present invention comprise producing an engineered AtRLP23 protein comprising a modified amino acid sequence. The engineered AtRLP23 protein can be produced, for example, by chemically synthesizing a polypeptide comprising the modified amino acid sequence or by producing a nucleic acid molecule encoding a polypeptide comprising the modified amino acid sequence and expressing the nucleotide acid molecule in a cell or in vitro, whereby an engineered AtRLP23 protein comprising the modified amino acid sequence is produced. It is recognized that such nucleic acid molecules can be produced, for example, by routine molecular biology methods disclosed elsewhere or otherwise known in the art or by chemical synthesis using a DNA synthesizer. Such molecular biology methods include, but are not limited to, gene editing, PCR amplification, cloning, site-directed mutagenesis, restriction nuclease enzyme digestion, ligation, and the like. It is further recognized that a nucleic acid molecule encoding an engineered AtRLP23 protein comprising a modified amino acid sequence can be produced within the genome of a plant cell or other host cell using genome-editing methods that are disclosed herein below or are otherwise known in the art.

[0621] Amino acid sequences encoding engineered AtRLP23 proteins produced by the methods of the present invention include, but are not limited to, the amino acid sequences set forth in SEQ ID NOS: 44, 48, 52, and 56. In some embodiments of the invention, the engineered AtRLP23 proteins further comprise a 3×FLAG tag operably linked to the C-terminal end of the engineered AtRLP23 protein. The 3×FLAG tags were added to certain of the engineered AtRLP23 proteins of the present invention to aid in detection and/or purification the engineered AtRLP23 proteins and are not believed to alter the biological function and/or membrane localization of the engineered AtRLP23 proteins. Examples of engineered AtRLP23 proteins of the present invention lacking a kinase but comprising a 3×FLAG tag have the amino acid sequences set forth in SEQ ID NO: 46, 50, 54, and 58.

[0622] The present invention further provides methods for making nucleic acid molecules encoding engineered AtRLP23 proteins of the present invention that are capable of conferring to a plant enhanced resistance to at least one plant pathogen. The methods comprise synthesizing a nucleic acid molecule encoding the amino acid sequence of an engineered AtRLP23 of the present invention. It is recognized that it is routine to make a nucleic acid molecule encoding a protein of interest and that such a nucleic acid molecule can be synthesized using, for example, a DNA synthesizer and/or using standard molecular biology methods described hereinbelow or otherwise known the art such as, for example, restriction endonuclease digestion, ligation, polymerase chain reaction (PCR) amplification, site-directed mutagenesis, sequencing, and the like. Examples of nucleic acid molecules encoding such engineered AtRLP23 proteins that are producible by the methods of the present invention are nucleic molecules comprising at least one of the nucleotide sequences set forth in SEQ ID NOS: 15, 17, 19, 21, 31, 33, 39, 41, 43, 45, 47, 49, 51, 53, 55, 57, 59, and 61.

[0623] The present invention provides not only engineered AtRLP23 proteins comprising a kinase domain, but also engineered AtRLP23 proteins lacking a kinase domain. Such engineered AtRLP23 proteins of the present invention that lack a kinase domain comprise or consist of an amino acid sequence that is not identical to the full-length amino acid sequence of AtRLP23 and can be produced by the methods disclosed herein.

[0624] The present invention further relates to compositions comprising at least one engineered AtRLP23 protein of the present invention and/or at least one nucleic acid molecule encoding such an engineered AtRLP23 protein. Such compositions include, but not limited to, plants, plant cells, and other host cells comprising one or more of such engineered AtRLP23 proteins and/or one or more nucleic acid molecules encoding such engineered AtRLP23 proteins, and expression cassettes and vectors comprising one or more of such nucleic acid molecules.

[0625] The present invention additionally provides methods for enhancing the resistance of a plant to a plant pathogen, particularly a plant comprising partial resistance to the plant pathogen. As used herein, full or complete resistance is defined as the inability of the pathogen to spread within the host plant genotype. With full resistance, localized cell death is observed on the plant after being contacted by the pathogen but there are no spreading lesions. In contrast with partial resistance, the pathogen may still be able to infect the host plant and cause a spreading lesion, but the spread of the lesion is restricted or limited, when compared to a susceptible plant.

[0626] Such methods for enhancing the resistance of a plant comprise modifying a plant cell to be capable of expressing (also referred to herein as overexpression) of at least one engineered AtRLP23 protein. The methods optionally further comprise regenerating the modified plant cell into a modified plant comprising enhanced resistance to the plant pathogen.

[0627] In some embodiments, the methods comprise introducing into at least one plant cell a polynucleotide construct comprising a promoter that drives expression in a plant and an operably linked nucleic acid molecule encoding the engineered AtRLP23 protein using plant transformation methods described elsewhere herein or otherwise known in the art. Preferred promoters for enhancing the resistance of a plant to a plant pathogen are promoters known to drive high-level gene expression such as, for example, the CaMV 35S promoter. Additional promoters that are suitable for use in the methods of the present invention are described hereinbelow.

[0628] The methods of the present invention find use in producing plants with enhanced resistance to a plant disease caused by a plant pathogen. Typically, the methods of the present invention will enhance or increase the resistance of the subject plant to one strains of a plant pathogen or to each of two or more strains of the plant pathogen by at least 25%, 50%, 75%, 100%, 150%, 200%, 250%, 500% or more when compared to the resistance of a control to same strain or strains of the plant pathogen. Unless stated otherwise or apparent from the context of a use, a control plant for the present invention is a plant that does not comprise the polynucleotide construct of the present invention. Preferably, the control plant is essentially identical (e.g. same species, subspecies, and variety) to the plant comprising the polynucleotide construction of the present invention accept the control does not comprise the polynucleotide construct. In some embodiments, the control plant will comprise a polynucleotide construct but not comprise one or more nucleotide sequences encoding an engineered AtRLP23 protein that are in a polynucleotide construct of the present invention. In other embodiments, the control plant will not comprise an engineered AtRLP23 protein of the present invention.

[0629] The plants of the present invention comprising an engineered AtRLP23 protein disclosed herein find use in methods for limiting plant disease caused by at least one plant pathogen in agricultural crop production, particularly in regions where such a plant disease is prevalent and is known to negatively impact, or at least has the potential to negatively impact, agricultural yield. The methods of the invention comprise planting a plant (e.g. a seedling), seed, or tuber of the present invention, wherein the plant, seed, or tuber comprises at least one engineered AtRLP23 protein of the present invention and/or at least one nucleotide molecule encoding engineered AtRLP23 protein. The methods further comprise growing the plant that is derived from the seedling, seed, or tuber under environmental conditions favorable for the growth and development of the plant, and optionally harvesting at least one fruit, tuber, leaf, or seed from the plant. Such environmental conditions can include, for example, air temperature, soil temperature, soil water content, photoperiod, light intensity, soil pH, and soil fertility. It is recognized that the environmental conditions favorable for the growth and development of a plant of interest will vary depending on, for example, the plant species or even the particular variety (e.g. cultivar) or genotype of the plant of interest. It is further recognized that the environmental conditions that are favorable for the growth and development of the plants of interest of the present invention are known in the art.

[0630] Additionally, the present invention provides plants, seeds, and plant cells produced by the methods of present invention and/or comprising a polynucleotide construct of the present invention. Also provided are progeny plants and seeds thereof comprising a polynucleotide construct of the present invention. The present invention also provides seeds, vegetative parts, and other plant parts produced by the transformed plants and/or progeny plants of the invention as well as food products and other agricultural products produced from such plant parts that are intended to be consumed or used by humans and other animals including, but not limited to pets (e.g., dogs and cats) and livestock (e.g., pigs, cows, chickens, turkeys, and ducks).

[0631] The present invention encompasses isolated or substantially purified polynucleotide (also referred to herein as “nucleic acid molecule”, “nucleic acid” and the like) or protein (also referred to herein as “polypeptide”) compositions including, for example, polynucleotides and proteins comprising the sequences set forth in the accompanying Sequence Listing as well as variants and fragments of such polynucleotides and proteins. An “isolated” or “purified” polynucleotide or protein, or biologically active portion thereof, is substantially or essentially free from components that normally accompany or interact with the polynucleotide or protein as found in its naturally occurring environment. Thus, an isolated or purified polynucleotide or protein is substantially free of other cellular material or culture medium when produced by recombinant techniques, or substantially free of chemical precursors or other chemicals when chemically synthesized. Optimally, an “isolated” polynucleotide is free of sequences (optimally protein encoding sequences) that naturally flank the polynucleotide (i.e., sequences located at the 5′ and 3′ ends of the polynucleotide) in the genomic DNA of the organism from which the polynucleotide is derived. For example, in various embodiments, the isolated polynucleotide can contain less than about 5 kb, 4 kb, 3 kb, 2 kb, 1 kb, 0.5 kb, or 0.1 kb of nucleotide sequence that naturally flank the polynucleotide in genomic DNA of the cell from which the polynucleotide is derived. A protein that is substantially free of cellular material includes preparations of protein having less than about 30%, 20%, 10%, 5%, or 1% (by dry weight) of contaminating protein. When the protein of the invention or biologically active portion thereof is recombinantly produced, optimally culture medium represents less than about 30%, 20%, 10%, 5%, or 1% (by dry weight) of chemical precursors or non-protein-of-interest chemicals.

[0632] Fragments and variants of the disclosed polynucleotides and proteins encoded thereby are also encompassed by the present invention. By “fragment” is intended a portion of the polynucleotide or a portion of the amino acid sequence and hence protein encoded thereby. Fragments of polynucleotides comprising coding sequences may encode protein fragments that retain biological activity of the full-length or native protein. Alternatively, fragments of a polynucleotide that are useful as hybridization probes generally do not encode proteins that retain biological activity or do not retain promoter activity. Thus, fragments of a nucleotide sequence may range from at least about 20 nucleotides, about 50 nucleotides, about 100 nucleotides, and up to the full-length polynucleotide of the invention.

[0633] “Variants” is intended to mean substantially similar sequences. For polynucleotides, a variant comprises a polynucleotide having deletions (i.e., truncations) at the 5′ and/or 3′ end; deletion and/or addition of one or more nucleotides at one or more internal sites in the native polynucleotide; and/or substitution of one or more nucleotides at one or more sites in the native polynucleotide. As used herein, a “native” polynucleotide or polypeptide comprises a naturally occurring nucleotide sequence or amino acid sequence, respectively. For polynucleotides, conservative variants include those sequences that, because of the degeneracy of the genetic code, encode the amino acid sequence of one of the engineered AtRLP23 proteins of the invention. Variant polynucleotides include synthetically derived polynucleotides, such as those generated, for example, by using site-directed mutagenesis but which still encode an engineered AtRLP23 protein of the invention. Generally, variants of a polynucleotide of the invention will have at least about 80%, 85%, 90%, 91%, 92%, 93%, 94%, 95%, 96%, 97%, 98%, 99% or more sequence identity to that polynucleotide as determined by sequence alignment programs and parameters as described elsewhere herein. In certain embodiments of the invention, variants of a particular polynucleotide of the invention will have at least about 80%, 85%, 90%, 91%, 92%, 93%, 94%, 95%, 96%, 97%, 98%, 99% or more sequence identity to at least one nucleotide sequence selected from the group consisting of SEQ ID NOS: 15, 17, 19, 21, 31, 33, 39, 41, 43, 45, 47, 49, 51, 53, 55, 57, 59, and 61.

[0634] Variants of a polynucleotide of the invention (i.e., the reference polynucleotide) can also be evaluated by comparison of the percent sequence identity between the polypeptide encoded by a variant polynucleotide and the polypeptide encoded by the reference polynucleotide. Thus, for example, a polynucleotide that encodes a polypeptide with a given percent sequence identity to the polypeptide of SEQ ID NO: 16, 18, 20, 22, 32, 34, 40, 42, 44, 46, 48, 50, 52, 54, 56, 58, 60, or 62 is disclosed. Percent sequence identity between any two polypeptides or between the corresponding parts (e.g. domains) of any two peptides can be calculated using sequence alignment programs and parameters described elsewhere herein. Where any given pair of polynucleotides of the invention or corresponding parts thereof is evaluated by comparison of the percent sequence identity shared by the two polypeptides they encode, the percent sequence identity between the two encoded polypeptides is at least about 50%, 55%, 60%, 65%, 70%, 75%, 80%, 85%, 86%, 87%, 88%, 89%, 90%, 91%, 92%, 93%, 94%, 95%, 96%, 97%, 98%, 99% or more sequence identity. In certain embodiments of the invention, variants of a particular polypeptide of the invention or domain there will have at least about 80%, 85%, 90%, 91%, 92%, 93%, 94%, 95%, 96%, 97%, 98%, 99% or more sequence identity to at least one of the full-length amino acid sequences set forth in SEQ ID NOS: 16, 18, 20, 22, 32, 34, 40, 42, 44, 46, 48, 50, 52, 54, 56, 58, 60, and 62. Preferably, the variants of a particular polypeptide of the invention will have one or more domains (e.g. SP domain, LRR domain, eJM domain, TM domain, kinase domain) that will have at least about 50%, 55%, 60%, 65% 70%, 75%, 80%, 85%, 90%, 91%, 92%, 93%, 94%, 95%, 96%, 97%, 98%, 99% or more sequence identity to the amino acid of the corresponding domain in the amino acid sequences set forth in SEQ ID NOS: 77-560.

[0635] “Variant” protein is intended to mean a protein derived from the native protein by deletion (so-called truncation) of one or more amino acids at the N-terminal and/or C-terminal end of the native protein; deletion and/or addition of one or more amino acids at one or more internal sites in the native protein; or substitution of one or more amino acids at one or more sites in the native protein. A biologically active variant of a protein of the invention may differ from that protein by as few as 1-15 amino acid residues, as few as 1-10, such as 6-10, as few as 5, as few as 4, 3, 2, or even 1 amino acid residue. Biologically active variants of an engineered AtRLP23 protein of the present invention will have at least about 80%, 85%, 86%, 87%, 88%, 89%, 90%, 91%, 92%, 93%, 94%, 95%, 96%, 97%, 98%, 99% or more sequence identity to the amino acid sequence for an engineered AtRLP23 protein set forth in the sequence listing (e.g. the amino acid sequence set forth in SEQ ID NO: 16, 18, 20, 22, 32, 34, 40, 42, 44, 46, 48, 50, 52, 54, 56, 58, 60, or 62) as determined by sequence alignment programs and parameters described elsewhere herein. Such biologically active variants of an engineered AtRLP23 protein of the present invention will typically comprise domains (e.g. SP domain, LRR domain, eJM domain, TM domain, kinase domain). The amino acid sequence of any one or more of the domains of such biologically active variants will comprise at least about 50%, 55%, 60%, 65% 70%, 75%, 80%, 85%, 90%, 91%, 92%, 93%, 94%, 95%, 96%, 97%, 98%, 99% or more sequence identity to the amino acid sequence of the corresponding domain of an engineered AtRLP23 protein set forth in the sequence listing as determined by sequence alignment programs and parameters described elsewhere herein. A biologically active variant of a protein of the invention or of a domain thereof may differ from that protein or domain by as few as 1-15 amino acid residues, as few as 1-10, such as 6-10, as few as 5, as few as 4, 3, 2, or even 1 amino acid residue.

[0636] The proteins of the invention may be altered in various ways including amino acid substitutions, deletions, truncations, and insertions. Methods for such manipulations are generally known in the art. Methods for mutagenesis and polynucleotide alterations are well known in the art. See, for example, Kunkel (1985) Proc. Natl. Acad. Sci. USA 82:488-492; Kunkel et al. (1987) Methods in Enzymol. 154:367-382; U.S. Pat. No. 4,873,192; Walker and Gaastra, eds. (1983) Techniques in Molecular Biology (MacMillan Publishing Company, New York) and the references cited therein. Guidance as to appropriate amino acid substitutions that do not affect biological activity of the protein of interest may be found in the model of Dayhoff et al. (1978) Atlas of Protein Sequence and Structure (Natl. Biomed. Res. Found., Washington, D.C.), herein incorporated by reference. Conservative substitutions, such as exchanging one amino acid with another having similar properties, may be optimal.

[0637] The deletions, insertions, and substitutions of the protein sequences encompassed herein are not expected to produce radical changes in the characteristics of the protein. However, when it is difficult to predict the exact effect of the substitution, deletion, or insertion in advance of doing so, one skilled in the art will appreciate that the effect will be evaluated by routine screening assays. That is, the activity can be evaluated by, for example, assays for monitoring transient changes in cytosolic Ca²⁺ concentration after the addition of an elicitor to a population of plant protoplasts expressing an engineered AtRLP23 protein. Such assays are described in detail in Examples 1-5 hereinbelow. Preferably, the engineered AtRLP23 proteins of the present invention comprise increased activity or increased responsiveness when compared to the activity or responsiveness of AtRLP23 (or AtRLP23-3×FLAG or other suitable control) in one or more of the assays disclosed elsewhere herein or otherwise known in the art.

[0638] For example, a plant that is susceptible to a plant disease caused by a plant pathogen of interest can be transformed with a polynucleotide construct encoding an engineered AtRLP23 protein of the present invention, regenerated into a transformed or transgenic plant comprising the polynucleotide constructs, and tested for resistance using standard disease resistance assays known in the art or described elsewhere herein.

[0639] Variant polynucleotides and proteins also encompass sequences and proteins derived from a mutagenic and recombinogenic procedure such as DNA shuffling. Strategies for such DNA shuffling are known in the art. See, for example, Stemmer (1994) Proc. Natl. Acad. Sci. USA 91:10747-10751; Stemmer (1994) Nature 370:389-391; Crameri et al. (1997) Nature Biotech. 15:436-438; Moore et al. (1997)J Mol. Biol. 272:336-347; Zhang et al. (1997) Proc. Natl. Acad. Sci. USA 94:4504-4509; Crameri et al. (1998) Nature 391:288-291; and U.S. Pat. Nos. 5,605,793 and 5,837,458.

[0640] Preferably, the engineered AtRLP23 proteins of the present invention and the polynucleotides encoding them confer, or are capable of conferring, upon a plant comprising such a protein or polynucleotide, enhanced resistance to at least one plant pathogen, but preferably to two, three, four, five, or more plant pathogens.

[0641] PCR amplification can be used in certain embodiments of the methods of the present invention. Methods for designing PCR primers and PCR amplification are generally known in the art and are disclosed in Sambrook et al. (1989) Molecular Cloning: A Laboratory Manual (2d ed., Cold Spring Harbor Laboratory Press, Plainview, N.Y.). See also Innis et al., eds. (1990) PCR Protocols: A Guide to Methods and Applications (Academic Press, New York); Innis and Gelfand, eds. (1995) PCR Strategies (Academic Press, New York); and Innis and Gelfand, eds. (1999) PCR Methods Manual (Academic Press, New York). Known methods of PCR amplification include, but are not limited to, methods using paired primers, nested primers, single specific primers, degenerate primers, gene-specific primers, vector-specific primers, partially mismatched primers, and the like.

[0642] It is recognized that the nucleic acid molecules encoding an engineered AtRLP23 protein of the present invention encompass nucleic acid molecules comprising a nucleotide sequence that is sufficiently identical to the nucleotide sequence of SEQ ID NO: 15, 17, 19, 21, 31, 33, 39, 41, 43, 45, 47, 49, 51, 53, 55, 57, 59, and/or 61. The term “sufficiently identical” is used herein to refer to a first amino acid or nucleotide sequence that contains a sufficient or minimum number of identical or equivalent (e.g., with a similar side chain) amino acid residues or nucleotides to a second amino acid or nucleotide sequence such that the first and second amino acid or nucleotide sequences have a common structural domain(s) and/or common functional activity, such as, for example, disease resistance. For example, amino acid or nucleotide sequences that contain a common structural domain(s) and/or sequences having at least about 45%, 55%, or 65% identity, preferably 75% identity, more preferably 85%, 86%, 87%, 88%, 89%, 90%, 95%, 96%, 97%, 98% or 99% identity, can be as sufficiently identical.

[0643] To determine the percent identity of two amino acid sequences or of two nucleic acids, the sequences are aligned for optimal comparison purposes. The percent identity between the two sequences is a function of the number of identical positions shared by the sequences (i.e., percent identity=number of identical positions/total number of positions (e.g., overlapping positions)×100). In one embodiment, the two sequences are the same length. The percent identity between two sequences can be determined using techniques similar to those described below, with or without allowing gaps. In calculating percent identity, typically exact matches are counted.

[0644] The determination of percent identity between two sequences can be accomplished using a mathematical algorithm. A preferred, nonlimiting example of a mathematical algorithm utilized for the comparison of two sequences is the algorithm of Karlin and JessAltschul (1990) Proc. Natl. Acad. Sci. USA 87:2264, modified as in Karlin and Altschul (1993) Proc. Natl. Acad. Sci. USA 90:5873-5877. Such an algorithm is incorporated into the NBLAST and)(BLAST programs of Altschul et al. (1990) J Mol. Biol. 215:403. BLAST nucleotide searches can be performed with the NBLAST program, score=100, wordlength=12, to obtain nucleotide sequences homologous to the polynucleotide molecules of the invention. BLAST protein searches can be performed with the)(BLAST program, score=50, wordlength=3, to obtain amino acid sequences homologous to protein molecules of the invention. To obtain gapped alignments for comparison purposes, Gapped BLAST can be utilized as described in Altschul et al. (1997) Nucleic Acids Res. 25:3389. Alternatively, PSI-Blast can be used to perform an iterated search that detects distant relationships between molecules. See Altschul et al. (1997) supra. When utilizing BLAST, Gapped BLAST, and PSI-Blast programs, the default parameters of the respective programs (e.g., XBLAST and NBLAST; available on the world-wide web at ncbi.nlm.nih.gov). Another preferred, non-limiting example of a mathematical algorithm utilized for the comparison of sequences is the algorithm of Myers and Miller (1988) CABIOS 4:11-17. Such an algorithm is incorporated into the ALIGN program (version 2.0), which is part of the GCG sequence alignment software package. When utilizing the ALIGN program for comparing amino acid sequences, a PAM120 weight residue table, a gap length penalty of 12, and a gap penalty of 4 can be used. Alignment may also be performed manually by inspection.

[0645] Unless otherwise stated, sequence identity/similarity values provided herein refer to the value obtained using the full-length sequences of the invention and using multiple alignment by mean of the algorithm Clustal W (Nucleic Acid Research, 22(22):4673-4680, 1994) using the program AlignX included in the software package Vector NTI Suite Version 7 (InforMax, Inc., Bethesda, Md., USA) using the default parameters; or any equivalent program thereof. By “equivalent program” is intended any sequence comparison program that, for any two sequences in question, generates an alignment having identical nucleotide or amino acid residue matches and an identical percent sequence identity when compared to the corresponding alignment generated by CLUSTALW (Version 1.83) using default parameters (available at the European Bioinformatics Institute website on the world-wide web at: ebi.ac.uk/Tools/clustalw/index.html).

[0646] The use of the term “polynucleotide” is not intended to limit the present invention to polynucleotides comprising DNA. Those of ordinary skill in the art will recognize that polynucleotides, can comprise ribonucleotides and combinations of ribonucleotides and deoxyribonucleotides. Such deoxyribonucleotides and ribonucleotides include both naturally occurring molecules and synthetic analogues. The polynucleotides of the invention also encompass all forms of sequences including, but not limited to, single-stranded forms, double-stranded forms, hairpins, stem-and-loop structures, and the like.

[0647] The polynucleotide constructs comprising engineered AtRLP23 protein coding regions can be provided in expression cassettes for expression in the plant or other organism or in a host cell of interest. The cassette will include 5′ and 3′ regulatory sequences operably linked to the protein coding region. “Operably linked” is intended to mean a functional linkage between two or more elements. For example, an operable linkage between a polynucleotide or gene of interest and a regulatory sequence (i.e., a promoter) is functional link that allows for expression of the polynucleotide of interest. Operably linked elements may be contiguous or non-contiguous. When used to refer to the joining of two protein coding regions, by operably linked is intended that the coding regions are in the same reading frame. The cassette may additionally contain at least one additional gene to be cotransformed into the organism. Alternatively, the additional gene(s) can be provided on multiple expression cassettes. Such an expression cassette is provided with a plurality of restriction sites and/or recombination sites for insertion of the protein coding region to be under the transcriptional regulation of the regulatory regions. The expression cassette may additionally contain selectable marker genes.

[0648] The expression cassette will include in the 5′-3′ direction of transcription, a transcriptional and translational initiation region (i.e., a promoter), an engineered AtRLP23 protein coding region of the invention, and a transcriptional and translational termination region (i.e., termination region) functional in plants or other organism or non-human host cell. The regulatory regions (i.e., promoters, transcriptional regulatory regions, and translational termination regions) and/or the engineered AtRLP23 protein coding region or of the invention may be native/analogous to the host cell or to each other. Alternatively, the regulatory regions and/or the engineered AtRLP23 protein coding region of the invention may be heterologous to the host cell or to each other.

[0649] As used herein, “heterologous” in reference to a nucleic acid molecule or nucleotide sequence is a nucleic acid molecule or nucleotide sequence that originates from a foreign species, or, if from the same species, is modified from its native form in composition and/or genomic locus by deliberate human intervention. For example, a promoter operably linked to a heterologous polynucleotide is from a species different from the species from which the polynucleotide was derived, or, if from the same/analogous species, one or both are substantially modified from their original form and/or genomic locus, or the promoter is not the native promoter for the operably linked polynucleotide. As used herein, a chimeric gene comprises a coding sequence operably linked to a transcription initiation region that is heterologous to the coding sequence.

[0650] The present invention provides host cells comprising at least of the nucleic acid molecules, expression cassettes, and vectors of the present invention. In preferred embodiments of the invention, a host cell is a plant cell. In other embodiments, a host cell is selected from the group consisting of a bacterium, a fungal cell, and an animal cell. In certain embodiments, a host cell is non-human animal cell. However, in some other embodiments, the host cell is an in-vitro cultured human cell.

[0651] The termination region may be native with the transcriptional initiation region, may be native with the operably linked engineered AtRLP23 protein coding region of interest, may be native with the plant host, or may be derived from another source (i.e., foreign or heterologous to the promoter, the protein of interest, and/or the plant host), or any combination thereof. Convenient termination regions are available from the Ti-plasmid of A. tumefaciens, such as the octopine synthase and nopaline synthase termination regions. See also Guerineau et al. (1991)Mol. Gen. Genet. 262:141-144; Proudfoot (1991) Cell 64:671-674; Sanfacon et al. (1991) Genes Dev. 5:141-149; Mogen et al. (1990) Plant Cell 2:1261-1272; Munroe et al. (1990) Gene 91:151-158; Ballas et al. (1989) Nucleic Acids Res. 17:7891-7903; and Joshi et al. (1987) Nucleic Acids Res. 15:9627-9639.

[0652] Where appropriate, the polynucleotides may be optimized for increased expression in the transformed plant. That is, the polynucleotides can be synthesized using plant-preferred codons for improved expression. See, for example, Campbell and Gowri (1990) Plant Physiol. 92:1-11 for a discussion of host-preferred codon usage. Methods are available in the art for synthesizing plant-preferred genes. See, for example, U.S. Pat. Nos. 5,380,831, and 5,436,391, and Murray et al. (1989) Nucleic Acids Res. 17:477-498, herein incorporated by reference.

[0653] Additional sequence modifications are known to enhance gene expression in a cellular host. These include elimination of sequences encoding spurious polyadenylation signals, exon-intron splice site signals, transposon-like repeats, and other such well-characterized sequences that may be deleterious to gene expression. The G-C content of the sequence may be adjusted to levels average for a given cellular host, as calculated by reference to known genes expressed in the host cell. When possible, the sequence is modified to avoid predicted hairpin secondary mRNA structures.

[0654] Additionally, the polynucleotides can be modified to alter the amino acid sequences of the engineered AtRLP23 proteins, for example, to improve translational efficiency, protein stability and/or any other desired property or properties, and/or to reduce any one or more undesirable properties, while improving or at least not reducing significantly the biological activity of the engineered AtRLP23 proteins. For example, the polynucleotides can be modified to remove potential allergenic regions in the proteins encoded thereby. See, the AllergenOnline database for a comprehensive list of known and putative allergens (Goodman et al. (2016) Mol. Nutr. Food Res. 60(5):1183-1198; available on the World Wide Web at: allergenonline.org).

[0655] The expression cassettes may additionally contain 5′ leader sequences. Such leader sequences can act to enhance translation. Translation leaders are known in the art and include: picornavirus leaders, for example, EMCV leader (Encephalomyocarditis 5′ noncoding region) (Elroy-Stein et al. (1989) Proc. Natl. Acad. Sci. USA 86:6126-6130); potyvirus leaders, for example, TEV leader (Tobacco Etch Virus) (Gallie et al. (1995) Gene 165(2):233-238), MDMV leader (Maize Dwarf Mosaic Virus) (Virology 154:9-20), and human immunoglobulin heavy-chain binding protein (BiP) (Macejak et al. (1991) Nature 353:90-94); untranslated leader from the coat protein mRNA of alfalfa mosaic virus (AMV RNA 4) (Jobling et al. (1987) Nature 325:622-625); tobacco mosaic virus leader (TMV) (Gallie et al. (1989) in Molecular Biology of RNA, ed. Cech (Liss, New York), pp. 237-256); and maize chlorotic mottle virus leader (MCMV) (Lommel et al. (1991) Virology 81:382-385). See also, Della-Cioppa et al. (1987) Plant Physiol. 84:965-968.

[0656] In preparing the expression cassette, the various DNA fragments may be manipulated, so as to provide for the DNA sequences in the proper orientation and, as appropriate, in the proper reading frame. Toward this end, adapters (also referred to as “adaptors) or linkers may be employed to join the DNA fragments or other manipulations may be involved to provide for convenient restriction sites, removal of superfluous DNA, removal of restriction sites, or the like. For this purpose, in vitro mutagenesis, primer repair, restriction, annealing, resubstitutions, e.g., transitions and transversions, may be involved.

[0657] A number of promoters can be used in the practice of the invention. The promoters can be selected based on the desired outcome. The nucleic acids can be combined with constitutive, tissue-preferred, or other promoters for expression in plants. Such constitutive promoters include, for example, the core CaMV 35S promoter (Odell et al. (1985) Nature 313:810-812); rice actin (McElroy et al. (1990) Plant Cell 2:163-171); ubiquitin (Christensen et al. (1989) Plant Mot. Biol. 12:619-632 and Christensen et al. (1992) Plant Mol. Biol. 18:675-689); pEMU (Last et al. (1991) Theor. Appl. Genet. 81:581-588); MAS (Velten et al. (1984) EMBO J. 3:2723-2730); ALS promoter (U.S. Pat. No. 5,659,026), and the like. Other constitutive promoters include, for example, U.S. Pat. Nos. 5,608,149; 5,608,144; 5,604,121; 5,569,597; 5,466,785; 5,399,680; 5,268,463; 5,608,142; and 6,177,611.

[0658] Tissue-preferred promoters can be utilized to target enhanced expression of the engineered AtRLP23 protein coding sequences within a particular plant tissue. Such tissue-preferred promoters include, but are not limited to, leaf-preferred promoters, root-preferred promoters, seed-preferred promoters, and stem-preferred promoters. Tissue-preferred promoters include Yamamoto et al. (1997) Plant J. 12(2):255-265; Kawamata et al. (1997) Plant Cell Physiol. 38(7):792-803; Hansen et al. (1997) Mol. Gen Genet. 254(3):337-343; Russell et al. (1997) Transgenic Res. 6(2):157-168; Rinehart et al. (1996) Plant Physiol. 112(3):1331-1341; Van Camp et al. (1996) Plant Physiol. 112(2):525-535; Canevascini et al. (1996) Plant Physiol. 112(2):513-524; Yamamoto et al. (1994) Plant Cell Physiol. 35(5):773-778; Lam (1994) Results Probl. Cell Differ. 20:181-196; Orozco et al. (1993) Plant Mol Biol. 23(6):1129-1138; Matsuoka et al. (1993) Proc Natl. Acad. Sci. USA 90(20):9586-9590; and Guevara-Garcia et al. (1993) Plant 4(3):495-505. Such promoters can be modified, if necessary, for weak expression.

[0659] The transgene can be expressed using an inducible promoter, such as, for example, a pathogen-inducible promoter. Such promoters include those from pathogenesis-related proteins (PR proteins), which are induced following infection by a pathogen; e.g., PR proteins, SAR proteins, beta-1,3-glucanase, chitinase, etc. See, for example, Redolfi et al. (1983) Neth. J. Plant Pathol. 89:245-254; Uknes et al. (1992) Plant Cell 4:645-656; and Van Loon (1985) Plant Mol. Virol. 4:111-116. See also WO 99/43819, herein incorporated by reference.

[0660] Of interest are promoters that are expressed locally at or near the site of pathogen infection. See, for example, Marineau et al. (1987) Plant Mol. Biol. 9:335-342; Matton et al. (1989) Molecular Plant-Microbe Interactions 2:325-331; Somsisch et al. (1986) Proc. Natl. Acad. Sci. USA 83:2427-2430; Somsisch et al. (1988) Mol. Gen. Genet. 2:93-98; and Yang (1996) Proc. Natl. Acad. Sci. USA 93:14972-14977. See also, Chen et al. (1996) Plant J. 10:955-966; Zhang et al. (1994) Proc. Natl. Acad. Sci. USA 91:2507-2511; Warner et al. (1993) Plant J. 3:191-201; Siebertz et al. (1989) Plant Cell 1:961-968; U.S. Pat. No. 5,750,386 (nematode-inducible); and the references cited therein. Of particular interest is the inducible promoter for the maize PRms gene, whose expression is induced by the pathogen Fusarium moniliforme (see, for example, Cordero et al. (1992) Physiol. Mol. Plant Path. 41:189-200).

[0661] Additionally, as pathogens find entry into plants through wounds or insect damage, a wound-inducible promoter may be used in the constructions of the invention. Such wound-inducible promoters include potato proteinase inhibitor (pin II) gene (Ryan (1990) Ann. Rev. Phytopath. 28:425-449; Duan et al. (1996) Nature Biotechnology 14:494-498); wun1 and wun2, U.S. Pat. No. 5,428,148; win1 and win2 (Stanford et al. (1989) Mol. Gen. Genet. 215:200-208); systemin (McGurl et al. (1992) Science 225:1570-1573); WIP1 (Rohmeier et al. (1993) Plant Mol. Biol. 22:783-792; Eckelkamp et al. (1993) FEBS Letters 323:73-76); MPI gene (Corderok et al. (1994) Plant J. 6(2):141-150); and the like, herein incorporated by reference.

[0662] Chemical-regulated promoters can be used to modulate the expression of a gene in a plant through the application of an exogenous chemical regulator. Depending upon the objective, the promoter may be a chemical-inducible promoter, where application of the chemical induces gene expression, or a chemical-repressible promoter, where application of the chemical represses gene expression. Chemical-inducible promoters are known in the art and include, but are not limited to, the maize In2-2 promoter, which is activated by benzenesulfonamide herbicide safeners, the maize GST promoter, which is activated by hydrophobic electrophilic compounds that are used as pre-emergent herbicides, and the tobacco PR-1a promoter, which is activated by salicylic acid. Other chemical-regulated promoters of interest include steroid-responsive promoters (see, for example, the glucocorticoid-inducible promoter in Schena et al. (1991) Proc. Natl. Acad. Sci. USA 88:10421-10425 and McNellis et al. (1998) Plant J. 14(2):247-257) and tetracycline-inducible and tetracycline-repressible promoters (see, for example, Gatz et al. (1991) Mol. Gen. Genet. 227:229-237, and U.S. Pat. Nos. 5,814,618 and 5,789,156), herein incorporated by reference.

[0663] The expression cassette can also comprise a selectable marker gene for the selection of transformed cells. Selectable marker genes are utilized for the selection of transformed cells or tissues. Marker genes include genes encoding antibiotic resistance, such as those encoding neomycin phosphotransferase II (NEO) and hygromycin phosphotransferase (HPT), as well as genes conferring resistance to herbicidal compounds, such as glufosinate ammonium, bromoxynil, imidazolinones, and 2,4-dichlorophenoxyacetate (2,4-D). Additional selectable markers include phenotypic markers such as β-galactosidase and fluorescent proteins such as green fluorescent protein (GFP) (Su et al. (2004) Biotechnol Bioeng 85:610-9 and Fetter et al. (2004) Plant Cell 16:215-28), cyan florescent protein (CYP) (Bolte et al. (2004) J. Cell Science 117:943-54 and Kato et al. (2002) Plant Physiol 129:913-42), and yellow florescent protein (PhiYFP™ from Evrogen, see, Bolte et al. (2004) J. Cell Science 117:943-54). For additional selectable markers, see generally, Yarranton (1992) Curr. Opin. Biotech. 3:506-511; Christopherson et al. (1992) Proc. Natl. Acad. Sci. USA 89:6314-6318; Yao et al. (1992) Cell 71:63-72; Reznikoff (1992) Mol. Microbiol. 6:2419-2422; Barkley et al. (1980) in The Operon, pp. 177-220; Hu et al. (1987) Cell 48:555-566; Brown et al. (1987) Cell 49:603-612; Figge et al. (1988) Cell 52:713-722; Deuschle et al. (1989) Proc. Natl. Acad. Aci. USA 86:5400-5404; Fuerst et al. (1989) Proc. Natl. Acad. Sci. USA 86:2549-2553; Deuschle et al. (1990) Science 248:480-483; Gossen (1993) Ph.D. Thesis, University of Heidelberg; Reines et al. (1993) Proc. Natl. Acad. Sci. USA 90:1917-1921; Labow et al. (1990)Mol. Cell. Biol. 10:3343-3356; Zambretti et al. (1992) Proc. Natl. Acad. Sci. USA 89:3952-3956; Bairn et al. (1991) Proc. Natl. Acad. Sci. USA 88:5072-5076; Wyborski et al. (1991) Nucleic Acids Res. 19:4647-4653; Hillenand-Wissman (1989) Topics Mol. Struc. Biol. 10:143-162; Degenkolb et al. (1991) Antimicrob. Agents Chemother. 35:1591-1595; Kleinschnidt et al. (1988) Biochemistry 27:1094-1104; Bonin (1993) Ph.D. Thesis, University of Heidelberg; Gossen et al. (1992) Proc. Natl. Acad. Sci. USA 89:5547-5551; Oliva et al. (1992) Antimicrob. Agents Chemother. 36:913-919; Hlavka et al. (1985) Handbook of Experimental Pharmacology, Vol. 78 (Springer-Verlag, Berlin); Gill et al. (1988) Nature 334:721-724. Such disclosures are herein incorporated by reference.

[0664] The above list of selectable marker genes is not intended to be limiting. Any selectable marker gene can be used in the present invention.

[0665] Numerous plant transformation vectors and methods for transforming plants are available. See, for example, An, G. et al. (1986) Plant Pysiol., 81:301-305; Fry, J., et al. (1987) Plant Cell Rep. 6:321-325; Block, M. (1988) Theor. Appl Genet. 76:767-774; Hinchee, et al. (1990) Stadler. Genet. Symp. 203212.203-212; Cousins, et al. (1991) Aust. J. Plant Physiol. 18:481-494; Chee, P. P. and Slightom, J. L. (1992) Gene. 118:255-260; Christou, et al. (1992) Trends. Biotechnol. 10:239-246; D'Halluin, et al. (1992) Bio/Technol. 10:309-314; Dhir, et al. (1992) Plant Physiol. 99:81-88; Casas et al. (1993) Proc. Nat. Acad Sci. USA 90:11212-11216; Christou, P. (1993) In Vitro Cell. Dev. Biol.-Plant; 29P:119-124; Davies, et al. (1993) Plant Cell Rep. 12:180-183; Dong, J. A. and Mchughen, A. (1993) Plant Sci. 91:139-148; Franklin, C. I. and Trieu, T. N. (1993) Plant. Physiol. 102:167; Golovkin, et al. (1993) Plant Sci. 90:41-52; Guo Chin Sci. Bull. 38:2072-2078; Asano, et al. (1994) Plant Cell Rep. 13; Ayeres N. M. and Park, W. D. (1994) Crit. Rev. Plant. Sci. 13:219-239; Barcelo, et al. (1994) Plant. J. 5:583-592; Becker, et al. (1994) Plant. J. 5:299-307; Borkowska et al. (1994) Acta. Physiol Plant. 16:225-230; Christou, P. (1994) Agro. Food. Ind. Hi Tech. 5: 17-27; Eapen et al. (1994) Plant Cell Rep. 13:582-586; Hartman, et al. (1994) Bio-Technology 12: 919923; Ritala, et al. (1994) Plant. Mol. Biol. 24:317-325; and Wan, Y. C. and Lemaux, P. G. (1994) Plant Physiol. 104:3748.

[0666] Plant transformation vectors that find use in the present invention include, for example, T-DNA vectors or plasmids, which are suitable for use in Agrobacterium-mediated transformation methods that are disclosed elsewhere herein or otherwise known in the art.

[0667] The methods of the invention involve introducing a polynucleotide construct into a plant. By “introducing” is intended presenting to the plant the polynucleotide construct in such a manner that the construct gains access to the interior of a cell of the plant. The methods of the invention do not depend on a particular method for introducing a polynucleotide construct to a plant, only that the polynucleotide construct gains access to the interior of at least one cell of the plant. Methods for introducing polynucleotide constructs into plants are known in the art including, but not limited to, stable transformation methods, transient transformation methods, and virus-mediated methods.

[0668] By “stable transformation” is intended that the polynucleotide construct introduced into a plant integrates into the genome of the plant and is capable of being inherited by progeny thereof. By “transient transformation” is intended that a polynucleotide construct introduced into a plant does not integrate into the genome of the plant.

[0669] For the transformation of plants and plant cells, the nucleotide sequences of the invention are inserted using standard techniques into any vector known in the art that is suitable for expression of the nucleotide sequences in a plant or plant cell. The selection of the vector depends on the preferred transformation technique and the target plant species to be transformed.

[0670] Methodologies for constructing plant expression cassettes and introducing foreign nucleic acids into plants are generally known in the art and have been previously described. For example, foreign DNA can be introduced into plants, using tumor-inducing (Ti) plasmid vectors. Other methods utilized for foreign DNA delivery involve the use of PEG mediated protoplast transformation, electroporation, microinjection whiskers, and biolistics or microprojectile bombardment for direct DNA uptake. Such methods are known in the art. (U.S. Pat. No. 5,405,765 to Vasil et al.; Bilang et al. (1991) Gene 100: 247-250; Scheid et al., (1991) Mol. Gen. Genet., 228: 104-112; Guerche et al., (1987) Plant Science 52: 111-116; Neuhause et al., (1987) Theor. Appl Genet. 75: 30-36; Klein et al., (1987) Nature 327: 70-73; Howell et al., (1980) Science 208:1265; Horsch et al., (1985) Science 227: 1229-1231; DeBlock et al., (1989) Plant Physiology 91: 694-701; Methods for Plant Molecular Biology (Weissbach and Weissbach, eds.) Academic Press, Inc. (1988) and Methods in Plant Molecular Biology (Schuler and Zielinski, eds.) Academic Press, Inc. (1989). The method of transformation depends upon the plant cell to be transformed, stability of vectors used, expression level of gene products and other parameters.

[0671] Other suitable methods of introducing nucleotide sequences into plant cells and subsequent insertion into the plant genome include microinjection as Crossway et al. (1986) Biotechniques 4:320-334, electroporation as described by Riggs et al. (1986) Proc. Natl. Acad. Sci. USA 83:5602-5606, Agrobacterium-mediated transformation as described by Townsend et al., U.S. Pat. No. 5,563,055, Zhao et al., U.S. Pat. No. 5,981,840, direct gene transfer as described by Paszkowski et al. (1984) EMBO J. 3:2717-2722, and ballistic particle acceleration as described in, for example, Sanford et al., U.S. Pat. No. 4,945,050; Tomes et al., U.S. Pat. No. 5,879,918; Tomes et al., U.S. Pat. No. 5,886,244; Bidney et al., U.S. Pat. No. 5,932,782; Tomes et al. (1995) “Direct DNA Transfer into Intact Plant Cells via Microprojectile Bombardment,” in Plant Cell, Tissue, and Organ Culture: Fundamental Methods, ed. Gamborg and Phillips (Springer-Verlag, Berlin); McCabe et al. (1988) Biotechnology 6:923-926); and Lec1 transformation (WO 00/28058). Also see, Weissinger et al. (1988) Ann. Rev. Genet. 22:421-477; Sanford et al. (1987) Particulate Science and Technology 5:27-37 (onion); Christou et al. (1988) Plant Physiol. 87:671-674 (soybean); McCabe et al. (1988) Bio/Technology 6:923-926 (soybean); Finer and McMullen (1991) In Vitro Cell Dev. Biol. 27P:175-182 (soybean); Singh et al. (1998) Theor. Appl. Genet. 96:319-324 (soybean); Datta et al. (1990) Biotechnology 8:736-740 (rice); Klein et al. (1988) Proc. Natl. Acad. Sci. USA 85:4305-4309 (maize); Klein et al. (1988) Biotechnology 6:559-563 (maize); Tomes, U.S. Pat. No. 5,240,855; Buising et al., U.S. Pat. Nos. 5,322,783 and 5,324,646; Tomes et al. (1995) “Direct DNA Transfer into Intact Plant Cells via Microprojectile Bombardment,” in Plant Cell, Tissue, and Organ Culture: Fundamental Methods, ed. Gamborg (Springer-Verlag, Berlin) (maize); Klein et al. (1988) Plant Physiol. 91:440-444 (maize); Fromm et al. (1990) Biotechnology 8:833-839 (maize); Hooykaas-Van Slogteren et al. (1984) Nature (London) 311:763-764; Bowen et al., U.S. Pat. No. 5,736,369 (cereals); Bytebier et al. (1987) Proc. Natl. Acad. Sci. USA 84:5345-5349 (Liliaceae); De Wet et al. (1985) in The Experimental Manipulation of Ovule Tissues, ed. Chapman et al. (Longman, N.Y.), pp. 197-209 (pollen); Kaeppler et al. (1990) Plant Cell Reports 9:415-418 and Kaeppler et al. (1992) Theor. Appl. Genet. 84:560-566 (whisker-mediated transformation); D'Halluin et al. (1992) Plant Cell 4:1495-1505 (electroporation); Li et al. (1993) Plant Cell Reports 12:250-255 and Christou and Ford (1995) Annals of Botany 75:407-413 (rice); Osjoda et al. (1996) Nature Biotechnology 14:745-750 (maize via Agrobacterium tumefaciens); all of which are herein incorporated by reference.

[0672] The polynucleotides of the invention may be introduced into plants by contacting plants with a virus or viral nucleic acids. Generally, such methods involve incorporating a polynucleotide construct of the invention within a viral DNA or RNA molecule. Further, it is recognized that promoters of the invention also encompass promoters utilized for transcription by viral RNA polymerases. Methods for introducing polynucleotide constructs into plants and expressing a protein encoded therein, involving viral DNA or RNA molecules, are known in the art. See, for example, U.S. Pat. Nos. 5,889,191, 5,889,190, 5,866,785, 5,589,367 and 5,316,931; herein incorporated by reference.

[0673] If desired, the modified viruses or modified viral nucleic acids can be prepared in formulations. Such formulations are prepared in a known manner (see e.g. for review U.S. Pat. No. 3,060,084, EP-A 707 445 (for liquid concentrates), Browning, “Agglomeration”, Chemical Engineering, Dec. 4, 1967, 147-48, Perry's Chemical Engineer's Handbook, 4th Ed., McGraw-Hill, New York, 1963, pages 8-57 and et seq. WO 91/13546, U.S. Pat. Nos. 4,172,714, 4,144,050, 3,920,442, 5,180,587, 5,232,701, 5,208,030, GB 2,095,558, U.S. Pat. No. 3,299,566, Klingman, Weed Control as a Science, John Wiley and Sons, Inc., New York, 1961, Hance et al. Weed Control Handbook, 8th Ed., Blackwell Scientific Publications, Oxford, 1989 and Mollet, H., Grubemann, A., Formulation technology, Wiley VCH Verlag GmbH, Weinheim (Germany), 2001, 2. D. A. Knowles, Chemistry and Technology of Agrochemical Formulations, Kluwer Academic Publishers, Dordrecht, 1998 (ISBN 0-7514-0443-8), for example by extending the active compound with auxiliaries suitable for the formulation of agrochemicals, such as solvents and/or carriers, if desired emulsifiers, surfactants and dispersants, preservatives, antifoaming agents, anti-freezing agents, for seed treatment formulation also optionally colorants and/or binders and/or gelling agents.

[0674] In specific embodiments, the polynucleotide constructs and expression cassettes of the invention can be provided to a plant using a variety of transient transformation methods known in the art. Such methods include, for example, microinjection or particle bombardment. See, for example, Crossway et al. (1986) Mol Gen. Genet. 202:179-185; Nomura et al. (1986) Plant Sci. 44:53-58; Hepler et al. (1994) PNAS Sci. 91: 2176-2180 and Hush et al. (1994) J. Cell Science 107:775-784, all of which are herein incorporated by reference. Alternatively, the polynucleotide can be transiently transformed into the plant using techniques known in the art. Such techniques include viral vector system and Agrobacterium tumefaciens-mediated transient expression as described elsewhere herein.

[0675] The cells that have been transformed may be grown into plants in accordance with conventional ways. See, for example, McCormick et al. (1986) Plant Cell Reports 5:81-84. These plants may then be grown, and either pollinated with the same transformed strain or different strains, and the resulting hybrid having constitutive expression of the desired phenotypic characteristic identified. Two or more generations may be grown to ensure that expression of the desired phenotypic characteristic is stably maintained and inherited and then seeds harvested to ensure expression of the desired phenotypic characteristic has been achieved. In this manner, the present invention provides transformed seed (also referred to as “transgenic seed”) having a polynucleotide construct of the invention, for example, an expression cassette of the invention, stably incorporated into their genome.

[0676] Such methods known in the art for modifying DNA in the genome of a plant include, for example, mutation breeding and genome editing techniques, such as, for example, methods involving targeted mutagenesis, site-directed integration (SDI), and homologous recombination. Targeted mutagenesis or similar techniques are disclosed in U.S. Pat. Nos. 5,565,350; 5,731,181; 5,756,325; 5,760,012; 5,795,972, 5,871,984, and 8,106,259; all of which are herein incorporated in their entirety by reference. Methods for gene modification or gene replacement comprising homologous recombination can involve inducing single-strand or double-strand breaks in DNA using zinc-finger nucleases (ZFN), TAL (transcription activator-like) effector nucleases (TALEN), Clustered Regularly Interspaced Short Palindromic Repeats/CRISPR-associated nuclease (CRISPR/Cas nuclease), or homing endonucleases that have been engineered endonucleases to make double-strand breaks at specific recognition sequences in the genome of a plant, other organism, or host cell. See, for example, Durai et al., (2005) Nucleic Acids Res. 33:5978-90; Mani et al. (2005) Biochem. Biophys. Res. Comm 335:447-57; U.S. Pat. Nos. 7,163,824, 7,001,768, and 6,453,242; Arnould et al. (2006) J Mol. Biol. 355:443-58; Ashworth et al., (2006) Nature 441:656-9; Doyon et al. (2006) J Am Chem Soc 128:2477-84; Rosen et al., (2006) Nucleic Acids Res. 34:4791-800; and Smith et al., (2006) Nucleic Acids Res. 34:e149; U.S. Pat. App. Pub. No. 2009/0133152; and U.S. Pat. App. Pub. No. 2007/0117128; all of which are herein incorporated in their entirety by reference.

[0677] TAL effector nucleases (TALENs) can be used to make double-strand breaks at specific recognition sequences in the genome of a plant for gene modification or gene replacement through homologous recombination. TAL effector nucleases are a class of sequence-specific nucleases that can be used to make double-strand breaks at specific target sequences in the genome of a plant or other organism. TAL effector nucleases are created by fusing a native or engineered transcription activator-like (TAL) effector, or functional part thereof, to the catalytic domain of an endonuclease, such as, for example, FokI. The unique, modular TAL effector DNA binding domain allows for the design of proteins with potentially any given DNA recognition specificity. Thus, the DNA binding domains of the TAL effector nucleases can be engineered to recognize specific DNA target sites and thus, used to make double-strand breaks at desired target sequences. See, WO 2010/079430; Morbitzer et al. (2010) PNAS 10.1073/pnas.1013133107; Scholze and Boch (2010) Virulence 1:428-432; Christian et al. Genetics (2010) 186:757-761; Li et al. (2010) Nuc. Acids Res. (2010) doi:10.1093/nar/gkq704; and Miller et al. (2011) Nature Biotechnology 29:143-148; all of which are herein incorporated by reference.

[0678] The CRISPR/Cas nuclease system can also be used to make single-strand or double-strand breaks at specific recognition sequences in the genome of a plant for gene modification or gene replacement through homologous recombination. The CRISPR/Cas nuclease is an RNA-guided (simple guide RNA, sgRNA in short) DNA endonuclease system performing sequence-specific double-stranded breaks in a DNA segment homologous to the designed RNA. It is possible to design the specificity of the sequence (Cho S. W. et al., Nat. Biotechnol. 31:230-232, 2013; Cong L. et al., Science 339:819-823, 2013; Mali P. et al., Science 339:823-826, 2013; Feng Z. et al., Cell Research: 1-4, 2013).

[0679] In addition, a ZFN can be used to make double-strand breaks at specific recognition sequences in the genome of a plant for gene modification or gene replacement through homologous recombination. The Zinc Finger Nuclease (ZFN) is a fusion protein comprising the part of the FokI restriction endonuclease protein responsible for DNA cleavage and a zinc finger protein which recognizes specific, designed genomic sequences and cleaves the double-stranded DNA at those sequences, thereby producing free DNA ends (Urnov F. D. et al., Nat Rev Genet. 11:636-46, 2010; Carroll D., Genetics. 188:773-82, 2011).

[0680] Breaking DNA using site specific nucleases, such as, for example, those described herein above, can increase the rate of homologous recombination in the region of the breakage. Thus, coupling of such effectors as described above with nucleases enables the generation of targeted changes in genomes which include additions, deletions and other modifications.

[0681] Unless expressly stated or apparent from the context of usage, the methods and compositions of the present invention can be used with any plant species including, for example, monocotyledonous plants, dicotyledonous plants, and conifers. Examples of plant species of interest include, but are not limited to, corn (Zea mays), Brassica sp. (e.g., B. napus, B. rapa, B. juncea), particularly those Brassica species useful as sources of seed oil, alfalfa (Medicago sativa), rice (Oryza sativa), rye (Secale cereale), triticale (x Triticosecale or Triticum x Secale) sorghum (Sorghum bicolor, Sorghum vulgare), teff (Eragrostis tej), millet (e.g., pearl millet (Pennisetum glaucum), proso millet (Panicum miliaceum), foxtail millet (Setaria italica), finger millet (Eleusine coracana)), switchgrass (Panicum virgatum), sunflower (Helianthus annuus), safflower (Carthamus tinctorius), wheat (Triticum aestivum), soybean (Glycine max), tobacco (Nicotiana tabacum), potato (Solanum tuberosum), peanuts (Arachis hypogaea), cotton (Gossypium barbadense, Gossypium hirsutum), strawberry (e.g. Fragaria x ananassa, Fragaria vesca, Fragaria moschata, Fragaria virginiana, Fragaria chiloensis), sweet potato (Ipomoea batatus), yam (Dioscorea spp., D. rotundata, D. cayenensis, D. alata, D. polystachya, D. bulbifera, D. esculenta, D. dumetorum, D. trifida), cassava (Manihot esculenta), coffee (Coffea spp.), coconut (Cocos nucifera), oil palm (e.g. Elaeis guineensis, Elaeis oleifera), pineapple (Ananas comosus), citrus trees (Citrus spp.), cocoa (Theobroma cacao), tea (Camellia sinensis), banana (Musa spp.), avocado (Persea americana), fig (Ficus casica), guava (Psidium guajava), mango (Mangifera indica), olive (Olea europaea), papaya (Carica papaya), cashew (Anacardium occidentale), macadamia (Macadamia integrifolia), almond (Prunus amygdalus), date (Phoenix dactylifera), cultivated forms of Beta vulgaris (sugar beets, garden beets, chard or spinach beet, mangelwurzel or fodder beet), sugarcane (Saccharum spp.), oat (Avena sativa), barley (Hordeum vulgare), cannabis (Cannabis sativa, C. indica, C. ruderalis), poplar (Populus spp.), eucalyptus (Eucalyptus spp.), Arabidopsis thaliana, Arabidopsis rhizogenes, Nicotiana benthamiana, Brachypodium distachyon vegetables, ornamentals, and conifers and other trees. In specific embodiments, plants of the present invention are crop plants (e.g. maize, sorghum, wheat, millet, rice, barley, oats, sugarcane, alfalfa, soybean, peanut, sunflower, cotton, safflower, Brassica spp., lettuce, strawberry, apple, citrus, etc.).

[0682] Vegetables include tomatoes (Lycopersicon esculentum), eggplant (also known as “aubergine” or “brinjal”) (Solanum melongena), pepper (Capsicum annuum), lettuce (e.g., Lactuca sativa), green beans (Phaseolus vulgaris), lima beans (Phaseolus limensis), peas (Lathyrus spp.), chickpeas (Cicer arietinum), and members of the genus Cucumis such as cucumber (C. sativus), cantaloupe (C. cantalupensis), and musk melon (C. melo). Ornamentals include azalea (Rhododendron spp.), hydrangea (Macrophylla hydrangea), hibiscus (Hibiscus rosasanensis), roses (Rosa spp.), tulips (Tulipa spp.), daffodils (Narcissus spp.), petunias (Petunia hybrida), carnation (Dianthus caryophyllus), poinsettia (Euphorbia pulcherrima), and chrysanthemum. Fruit trees and related plants include, for example, apples, pears, peaches, plums, oranges, grapefruits, limes, pomelos, palms, and bananas. Nut trees and related plants include, for example, almonds, cashews, walnuts, pistachios, macadamia nuts, filberts, hazelnuts, and pecans.

[0683] In specific embodiments, the plants of the present invention are crop plants such as, for example, maize (corn), soybean, wheat, rice, cotton, alfalfa, sunflower, canola (Brassica spp., particularly Brassica napus, Brassica rapa, Brassica juncea), rapeseed (Brassica napus), sorghum, millet, barley, triticale, safflower, peanut, sugarcane, tobacco, potato, tomato, and pepper.

[0684] The term “plant” is intended to encompass plants at any stage of maturity or development, as well as any cells, tissues or organs (plant parts) taken or derived from any such plant unless otherwise clearly indicated by context. Plant parts include, but are not limited to, fruits, stems, tubers, roots, flowers, ovules, stamens, petals, leaves, hypocotyls, epicotyls, cotyledons, embryos, meristematic regions, callus tissue, anther cultures, gametophytes, sporophytes, pollen, microspores, protoplasts, seeds, and the like. It is recognized that the plant protoplasts of the present invention can be prepared from any one or more of the aforementioned plant parts and at any stage of development and/or maturity.

[0685] Likewise, the term “plant cell” is intended to encompass plant cells obtained from or in plants at any stage of maturity or development unless otherwise clearly indicated by context. Plant cells can be from or in plant parts including, but are not limited to, fruits, stems, tubers, roots, flowers, ovules, stamens, leaves, embryos, meristematic regions, callus tissue, anther cultures, gametophytes, sporophytes, pollen, microspores, in vitro-cultured tissues, organs or cells and the like. It is recognized that the plant protoplasts of the present invention can be prepared from any one or more of the aforementioned plant cells and at any stage of development and/or maturity. As used herein, unless expressly stated otherwise or apparent from the context of usage, the term “plant cell” is intended to encompass a plant protoplast.

[0686] In some embodiments of the present invention, a plant cell is transformed with a polynucleotide construct encoding an engineered an engineered AtRLP23 protein of the present invention. The term “expression” as used herein refers to the biosynthesis of a gene product, including the transcription and/or translation of said gene product. The “expression” or “production” of a protein or polypeptide from a DNA molecule refers to the transcription and translation of the coding sequence to produce the protein or polypeptide, while the “expression” or “production” of a protein or polypeptide from an RNA molecule refers to the translation of the RNA coding sequence to produce the protein or polypeptide. Examples of polynucleotide constructs and nucleic acid molecules that encode engineered AtRLP23 proteins are described elsewhere herein.

[0687] The use of the terms “DNA” or “RNA” herein is not intended to limit the present invention to polynucleotide molecules comprising DNA or RNA. Those of ordinary skill in the art will recognize that the methods and compositions of the invention encompass polynucleotide molecules comprised of deoxyribonucleotides (i.e., DNA), ribonucleotides (i.e., RNA) or combinations of ribonucleotides and deoxyribonucleotides. Such deoxyribonucleotides and ribonucleotides include both naturally occurring molecules and synthetic analogues including, but not limited to, nucleotide analogs or modified backbone residues or linkages, which are synthetic, naturally occurring, and non-naturally occurring, which have similar binding properties as the reference nucleic acid, and which are metabolized in a manner similar to the reference nucleotides. Examples of such analogs include, without limitation, phosphorothioates, phosphoramidates, methyl phosphonates, chiral-methyl phosphonates, 2-O-methyl ribonucleotides, peptide-nucleic acids (PNAs). The polynucleotide molecules of the invention also encompass all forms of polynucleotide molecules including, but not limited to, single-stranded forms, double-stranded forms, hairpins, stem-and-loop structures, and the like. Furthermore, it is understood by those of ordinary skill in the art that the nucleotide sequences disclosed herein also encompasses the complement of that exemplified nucleotide sequence.

[0688] The invention is drawn to compositions and methods for producing a plant with enhanced resistance to a plant disease caused by one, two, three, four or more plant pathogens. By “resistance to a plant disease” or “disease resistance” is intended that the plants avoid the disease symptoms that are the outcome of plant-pathogen interactions. That is, one or more pathogens are prevented from causing a plant disease or plant diseases and the associated disease symptoms, or alternatively, the disease symptoms caused by the one or more pathogens is minimized or lessened.

[0689] The present invention encompasses the polynucleotide constructs disclosed herein or in the accompanying sequence listing and/or drawings including, but not limited to, a polynucleotide construct comprising a nucleotide sequence selected from the group consisting of SEQ ID NOS: 15, 17, 19, 21, 31, 33, 39, 41, 43, 45, 47, 49, 51, 53, 55, 57, 59, and 61 and variants thereof as disclosed elsewhere herein. The present invention further encompasses plants, plant cells, host cells, and vectors comprising at least one of such polynucleotide constructs, as well as food products produced from such plants. Additionally encompassed by the present invention are uses of plants comprising at least one of such polynucleotide constructs in the methods disclosed elsewhere herein such as, for example, methods of limiting plant diseases in agricultural crop production.

[0690] Plant pathogens include, for example, bacteria, fungi, oomycetes, viruses, nematodes, and the like. Specific pathogens for the major crops include: Soybeans: Phytophthora megasperma fsp. glycinea, Macrophomina phaseolina, Rhizoctonia solani, Sclerotinia sclerotiorum, Fusarium oxysporum, Diaporthe phaseolorum var. sojae (Phomopsis sojae), Diaporthe phaseolorum var. caulivora, Sclerotium rolfsii, Cercospora kikuchii, Cercospora sojina, Peronospora manshurica, Colletotrichum dematium (Colletotichum truncatum), Corynespora cassiicola, Septoria glycines, Phyllosticta sojicola, Alternaria alternata, Pseudomonas syringae p.v. glycinea, Xanthomonas campestris p.v. phaseoli, Microsphaera diffusa, Fusarium semitectum, Phialophora gregata, Soybean mosaic virus, Glomerella glycines, Tobacco Ring spot virus, Tobacco Streak virus, Phakopsora pachyrhizi, Pythium aphanidermatum, Pythium ultimum, Pythium debaryanum, Tomato spotted wilt virus, Heterodera glycines Fusarium solani; Canola: Albugo candida, Alternaria brassicae, Leptosphaeria maculans, Rhizoctonia solani, Sclerotinia sclerotiorum, Mycosphaerella brassicicola, Pythium ultimum, Peronospora parasitica, Fusarium roseum, Alternaria alternata; Alfalfa: Clavibacter michiganese subsp. insidiosum, Pythium ultimum, Pythium irregulare, Pythium splendens, Pythium debaryanum, Pythium aphanidermatum, Phytophthora megasperma, Peronospora trifoliorum, Phoma medicaginis var. medicaginis, Cercospora medicaginis, Pseudopeziza medicaginis, Leptotrochila medicaginis, Fusarium oxysporum, Verticillium albo-atrum, Xanthomonas campestris p.v. alfalfae, Aphanomyces euteiches, Stemphylium herbarum, Stemphylium alfalfae, Colletotrichum trifolii, Leptosphaerulina briosiana, Uromyces striatus, Sclerotinia trifoliorum, Stagonospora meliloti, Stemphylium botryosum, Leptotrichila medicaginis; Wheat: Pseudomonas syringae p.v. atrofaciens, Urocystis agropyri, Xanthomonas campestris p.v. translucens, Pseudomonas syringae p.v. syringae, Alternaria alternata, Cladosporium herbarum, Fusarium graminearum, Fusarium avenaceum, Fusarium culmorum, Ustilago tritici, Ascochyta tritici, Cephalosporium gramineum, Collotetrichum graminicola, Erysiphe graminis f. sp. tritici, Puccinia graminis f sp. tritici, Puccinia recondita f sp. tritici, Puccinia striiformis, Pyrenophora tritici-repentis, Septoria nodorum, Septoria tritici, Septoria avenae, Pseudocercosporella herpotrichoides, Rhizoctonia solani, Rhizoctonia cerealis, Gaeumannomyces graminis var. tritici, Pythium aphanidermatum, Pythium arrhenomanes, Pythium ultimum, Bipolaris sorokiniana, Barley Yellow Dwarf Virus, Brome Mosaic Virus, Soil Borne Wheat Mosaic Virus, Wheat Streak Mosaic Virus, Wheat Spindle Streak Virus, American Wheat Striate Virus, Claviceps purpurea, Tilletia tritici, Tilletia laevis, Ustilago tritici, Tilletia indica, Rhizoctonia solani, Pythium arrhenomannes, Pythium gramicola, Pythium aphanidermatum, High Plains Virus, European wheat striate virus; Sunflower: Plasmopora halstedii, Sclerotinia sclerotiorum, Aster Yellows, Septoria helianthi, Phomopsis helianthi, Alternaria helianthi, Alternaria zinniae, Botrytis cinerea, Phoma macdonaldii, Macrophomina phaseolina, Erysiphe cichoracearum, Rhizopus oryzae, Rhizopus arrhizus, Rhizopus stolonifer, Puccinia helianthi, Verticillium dahliae, Erwinia carotovorum pv. carotovora, Cephalosporium acremonium, Phytophthora cryptogea, Albugo tragopogonis; Corn: Colletotrichum graminicola, Fusarium moniliforme var. subglutinans, Erwinia stewartii, Gibberella zeae (Fusarium graminearum), Fusarium verticilloides, Stenocarpella maydi (Diplodia maydis), Pythium irregulare, Pythium debaryanum, Pythium graminicola, Pythium splendens, Pythium ultimum, Pythium aphanidermatum, Aspergillus flavus, Bipolaris maydis O, T (Cochliobolus heterostrophus), Helminthosporium carbonum I, II & III (Cochliobolus carbonum), Exserohilum turcicum I, II & III, Helminthosporium pedicellatum, Physoderma maydis, Phyllosticta maydis, Kabatiella maydis, Cercospora sorghi, Ustilago maydis, Puccinia sorghi, Puccinia polysora, Macrophomina phaseolina, Penicillium oxalicum, Nigrospora oryzae, Cladosporium herbarum, Curvularia lunata, Curvularia inaequalis, Curvularia pallescens, Clavibacter michiganense subsp. nebraskense, Trichoderma viride, Maize Dwarf Mosaic Virus A & B, Wheat Streak Mosaic Virus, Maize Chlorotic Dwarf Virus, Claviceps sorghi, Pseudonomas avenae, Erwinia chrysanthemi pv. zea, Erwinia carotovora, Corn stunt spiroplasma, Diplodia macrospora, Sclerophthora macrospora, Peronosclerospora sorghi, Peronosclerospora philippinensis, Peronosclerospora maydis, Peronosclerospora sacchari, Sphacelotheca reiliana, Physopella zeae, Cephalosporium maydis, Cephalosporium acremonium, Maize Chlorotic Mottle Virus, High Plains Virus, Maize Mosaic Virus, Maize Rayado Fino Virus, Maize Streak Virus, Maize Stripe Virus, Maize Rough Dwarf Virus; Sorghum: Exserohilum turcicum, C. sublineolum, Cercospora sorghi, Gloeocercospora sorghi, Ascochyta sorghina, Pseudomonas syringae p.v. syringae, Xanthomonas campestris p.v. holcicola, Pseudomonas andropogonis, Puccinia purpurea, Macrophomina phaseolina, Perconia circinata, Fusarium moniliforme, Alternaria alternata, Bipolaris sorghicola, Helminthosporium sorghicola, Curvularia lunata, Phoma insidiosa, Pseudomonas avenae (Pseudomonas alboprecipitans), Ramulispora sorghi, Ramulispora sorghicola, Phyllachara sacchari, Sporisorium reilianum (Sphacelotheca reiliana), Sphacelotheca cruenta, Sporisorium sorghi, Sugarcane mosaic H, Maize Dwarf Mosaic Virus A & B, Claviceps sorghi, Rhizoctonia solani, Acremonium strictum, Sclerophthona macrospora, Peronosclerospora sorghi, Peronosclerospora philippinensis, Sclerospora graminicola, Fusarium graminearum, Fusarium verticillioides, Fusarium oxysporum, Pythium arrhenomanes, Pythium graminicola, etc.; Tomato: Corynebacterium michiganense pv. michiganense, Pseudomonas syringae pv. tomato, Ralstonia solanacearum, Xanthomonas vesicatoria, Xanthomonas perforans, Alternaria solani, Alternaria porri, Collectotrichum spp., Fulvia fulva Syn. Cladosporium fulvum, Fusarium oxysporum f. lycopersici, Leveillula taurica/Oidiopsis taurica, Phytophthora infestans, other Phytophthora spp., Pseudocercospora fuligena Syn. Cercospora fuligena, Sclerotium rolfsii, Septoria lycopersici, Meloidogyne spp.; Potato: Ralstonia solanacearum, Pseudomonas solanacearum, Erwinia carotovora subsp. Atroseptica Erwinia carotovora subsp. Carotovora, Pectobacterium carotovorum subsp. Atrosepticum, Pseudomonas fluorescens, Clavibacter michiganensis subsp. Sepedonicus, Corynebacterium sepedonicum, Streptomyces scabiei, Colletotrichum coccodes, Alternaria alternate, Mycovellosiella concors, Cercospora solani, Macrophomina phaseolina, Sclerotium bataticola, Choanephora cucurbitarum, Puccinia pittieriana, Aecidium cantensis, Alternaria solani, Fusarium spp., Phoma solanicola f. foveata, Botrytis cinerea, Botryotinia fuckeliana, Phytophthora infestans, Pythium spp., Phoma andigena var. andina, Pleospora herbarum, Stemphylium herbarum, Erysiphe cichoracearum, Spongospora subterranean Rhizoctonia solani, Thanatephorus cucumeris, Rosellinia sp. Dematophora sp., Septoria lycopersici, Helminthosporium solani, Polyscytalum pustulans, Sclerotium rolfsii, Athelia rolfsii, Angiosorus solani, Ulocladium atrum, Verticillium albo-atrum, V. dahlia, Synchytrium endobioticum, Sclerotinia sclerotiorum, Candidatus Liberibacter solanacearum; Banana: Fusarium oxysporum f. sp. cubense, Colletotrichum musae, Armillaria mellea, Armillaria tabescens, Pseudomonas solanacearum, Phyllachora musicola, Mycosphaerella fijiensis, Rosellinia bunodes, Pseudomas spp., Pestalotiopsis leprogena, Cercospora hayi, Pseudomonas solanacearum, Ceratocystis paradoxa, Verticillium theobromae, Trachysphaera fructigena, Cladosporium musae, Junghuhnia vincta, Cordana johnstonii, Cordana musae, Fusarium pallidoroseum, Colletotrichum musae, Verticillium theobromae, Fusarium spp., Acremonium spp., Cylindrocladium spp., Deightoniella torulosa, Nattrassia mangiferae, Dreschslera gigantean, Guignardia musae, Botryosphaeria ribis, Fusarium solani, Nectria haematococca, Fusarium oxysporum, Rhizoctonia spp., Colletotrichum musae, Uredo musae, Uromyces musae, Acrodontium simplex, Curvularia eragrostidis, Drechslera musae-sapientum, Leptosphaeria musarum, Pestalotiopsis disseminate, Ceratocystis paradoxa, Haplobasidion musae, Marasmiellus inoderma, Pseudomonas solanacearum, Radopholus similis, Lasiodiplodia theobromae, Fusarium pallidoroseum, Verticillium theobromae, Pestalotiopsis palmarum, Phaeoseptoria musae, Pyricularia grisea, Fusarium moniliforme, Gibberella fujikuroi, Erwinia carotovora, Erwinia chrysanthemi, Cylindrocarpon musae, Meloidogyne arenaria, Meloidogyne incognita, Meloidogyne javanica, Pratylenchus coffeae, Pratylenchus goodeyi, Pratylenchus brachyurus, Pratylenchus reniformia, Sclerotinia sclerotiorum, Nectria foliicola, Mycosphaerella musicola, Pseudocercospora musae, Limacinula tenuis, Mycosphaerella musae, Helicotylenchus multicinctus, Helicotylenchus dihystera, Nigrospora sphaerica, Trachysphaera frutigena, Ramichloridium musae, Verticillium theobromae, Phytophthora infestans, Phytophthora parasitica, Phytophthora ramorum, Phytophthora ipomoeae, Phytophthora mirabilis, Phytophthora capsici, Phytophthora porri, Phytophthora sojae, Phytophthora palmivora, and Phytophthora phaseoli.

[0691] Bacterial pathogens include, but are not limited to, i Agrobacterium tumefaciens, Candidatus Liberibacter asiaticus, Candidatus Liberibacter solanacearum, Clavibacter michiganensis, Clavibacter sepedonicus, Dickeya dadantii, Dickeya solani, Erwinia amylovora, Pectobacterium atrosepticum, Pectobacterium carotovorum, Pseudomonas andropogonis, Pseudomonas avenae, Pseudomonas alboprecipitans, Pseudomonas fluorescens, Pseudomonas savastanoi, Pseudomonas solanacearum, Pseudomonas syringae, Ralstonia solanacearum, Xanthomonas axonopodis, Xanthomonas campestris, Xanthomonas citri, Xanthomonas perforans, Xanthomonas vesicatoria, Xanthomonas oryzae, and Xylella fastidiosa.

[0692] Oomycete pathogens include, but are not limited to, Phytophthora infestans, Phytophthora ipomoeae, Phytophthora mirabilis, Phytophthora phaseoli, Phytophthora megasperma fsp. glycinea, Phytophthora megasperma, Phytophthora cryptogea, Peronospora spp. and Pythium spp.

[0693] Additional embodiments of the methods and compositions of the present invention are described elsewhere herein.

[0694] The following examples are offered by way of illustration and not by way of limitation.

### EXAMPLES

### Example 1: Heterologous Expression of AtRLP23-3×FLAG in Corn Confers Perception of PpNLP20

[0695] Plants employ receptor-like kinases (RLKs) and receptor-like proteins (RLPs) as pattern recognition receptors (PRRs) to monitor their apoplastic environment and detect non-self and damaged-self patterns as signs of potential danger (Boutrot and Zipfel, 2017. Annu. Rev. Phytopathol. 55:257, doi:10.1146/annurev-phyto-080614-120106). RLKs and RLPs contain a ligand-binding ectodomain and a single-pass transmembrane domain. RLKs have an intracellular kinase domain, whereas RLPs lack any obvious intracellular signalling domains (FIG. 1).

[0696] Following ligand (also known as elicitor) binding, PRRs are activated and induce a transient increase of cytosolic Ca²⁺ concentration as part of a PTI response. The transient increase of cytosolic Ca²⁺ concentration in response to a given elicitor can be monitored in a population of plant protoplasts expressing a calcium-binding fluorescent protein such as RGECO1.2 or luminescent protein such as aequorin. In a high-throughput method, the kinetics of PRR-dependent transient variation of cytosolic Ca²⁺ concentration can be measured with a fluorimeter or luminometer and in microplate formats of 96 or 384 wells.

[0697] The Necrosis- and Ethylene-inducing Protein 1 (Nep1)-like Protein (NLP) family of PAMPs are found in bacteria, fungi, and oomycetes (Bohm et al., 2014. PLoS Pathog. 10:e1004491, doi:10.1371/journal.ppat.1004491; Oome et al., 2014. Proc. Natl. Acad. Sci. USA 111:16955, doi:10.1073/pnas.1410031111; Albert et al., 2015. Nat. Plants 1:15140, doi:10.1038/nplants.2015.140). The 24-kDa Nep1 protein was originally discovered in the fungus Fusarium oxysporum (Bailey, 1995. Cell Biol. 85:1250, doi:10.1094/Phyto-85-1250) and NLPs were later identified by homology in the oomycetes Pythium aphanidermatum (Veit et al., 2001. Plant Physiol. 127:832, doi:10.1104/pp. 010350) and Phytophthora sojae (Qutob et al., 2002. Plant 32:361, doi:10.1046/j.1365-313X.2002.01439.x) as well as in the bacteria Bacillus halodurans and Streptomyces coelicolor (Qutob et al., 2002. Plant J. 32:361, doi:10.1046/j.1365-313X.2002.01439.x) and Erwinia carotovora (Pemberton et al., 2005. Mol. Plant Microbe. Interact. 18:343, doi:10.1094/MPMI-18-0343).

[0698] NLPs carry a conserved pattern of 24 amino acids (NLP24) which is sufficient to trigger plant immune responses (Böhm et al., 2014. PLoS Pathog. 10:e1004491, doi:10.1371/journal.ppat.1004491; Oome et al., 2014. Proc. Natl. Acad. Sci. USA 111:16955, doi:10.1073/pnas.1410031111; Albert et al., 2015. Nat. Plants 1:15140, doi:10.1038/nplants.2015.140). Within this 24-amino acid region, smaller epitopes have also the ability to induce defence responses in plants (Böhm et al., 2014. PLoS Pathog. 10:e1004491, doi:10.1371/journal.ppat.1004491; Oome et al., 2014. Proc. Natl. Acad. Sci. USA 111:16955, doi:10.1073/pnas.1410031111; Albert et al., 2015. Nat. Plants 1:15140, doi:10.1038/nplants.2015.140). A conserved 20-mer fragment (NLP20) derived from Phytophthora parasitica (PpNLP20; SEQ ID NO: 63) was confirmed to have a potent eliciting activity in Arabidopsis (Böhm et al., 2014. PLoS Pathog. 10:e1004491, doi:10.1371/journal.ppat.1004491).

[0699] Despite their diverse phylogenetic distribution, NLPs share a high degree of sequence similarity and several members of the family have the remarkable ability to induce cell death in as many as 20 dicotyledonous plants (Pemberton and Salmond, 2004. Mol. Plant Pathol. 5:353, doi:10.1111/j.1364-3703.2004.00235.x). Interestingly, no monocotyledonous plant tested produced any detectable response when treated with the protein NEP1 purified from F. oxysporum (tested in i Zea mays, Triticum aestivum, Stenotaphrum secundatum and Phalaris arundinacea) (Bailey, 1995. Cell Biol. 85:1250, doi:10.1094/Phyto-85-1250) or to the recombinant protein PaNie from Pythium aphanidermatum (tested in Zea mays, Avena sativa and Tradescantia zebrina) (Veit et al., 2001. Plant Physiol. 127:832, doi:10.1104/pp. 010350).

[0700] Recently, the Arabidopsis receptor-like protein (RLP) AtRLP23 was identified as the PRR that recognizes the NLPs (Albert et al., 2015. Nat. Plants 1:15140, doi:10.1038/nplants.2015.140). In presence of AtRLP23, Arabidopsis plants can perceive NLP20 from Phytophthora infestans, and NLP24 peptides derived from various NLPs of Hyaloperonospora arabidopsidis (HaNLP3), Botrytis cinerea (BcNEP2), and Bacillus subtilis (BsNPP).

[0701] To examine the function of AtRLP23 in corn, corn protoplasts were isolated from leaves of 10-day old maize seedlings that had been kept in the dark at 25° C. essentially as described in Sheen et al. (1990) Plant Cell 2:1027-1038. 32×10⁴ corn (Zea mays) protoplasts were co-transfected with either 10 μg of the AtRLP23-3×FLAG construct (SEQ ID NO: 13) under the control of an operably linked 2×35S+Ω promoter construct (SEQ ID NO: 72) and containing an operably linked rbcS terminator (SEQ ID NO: 73) or 10 μg of control DNA (pUC19, SEQ ID NO: 74), and 10 μg of reporter construct (ZmUbi::R-GECO1.2::rbcS, SEQ ID NO: 75) by PEG-mediated transformation using an adaptation of the method of Yoo et al. (2007) Nat Protocols 2:1565-1572. 100 μL of transfected protoplasts (32×10⁴ protoplasts) were transferred to each well of a white 96-well microplate (Greiner Bio-One, Lumitrac, model 655075), and then 50 μL of 3 μM PpNLP20 peptide (AIMYSWYFPKDSPVTGLGHR, SEQ ID NO: 63; prepared by diluting a 100 μM stock solution with protoplast incubation buffer) was added to each well. Fluorescence was monitored using a fluorimeter equipped with a 100 Hz xenon flash lamp with excitation at 556 nm and emission measured at 585 nm for 100 ms, every 22.6 seconds for 42 minutes. As shown in FIG. 2, transient expression of AtRLP23-3×FLAG in corn protoplasts led to a significant Ca²⁺ increase in response to PpNLP20 treatment. These results demonstrate that AtRLP23-3×FLAG expression in corn protoplast leads to PpNLP20 perception.

### Example 2: Swapping the Extra-Juxtamembrane (eJM) Domain of AtRLP23 with Another eJM Domain Improves Activity

[0702] Recent evidence indicates that AtRLP23 constitutively interacts with the RLK, AtSOBIR1 (Gust and Felix, 2014. Curr. Opin. Plant Biol. 21:104, doi:10.1016/j.pbi.2014.07.007). As AtSOBIR1 only harbors a short ectodomain, an RLP/SOBIR1 heterodimer may function as a bi-modular RLK where the RLP ectodomain recognizes the elicitor and the SOBIR1 kinase domain functions in intracellular signalling (Gust and Felix, 2014. Curr. Opin. Plant Biol. 21:104, doi:10.1016/j.pbi.2014.07.007). Interestingly, all the RLPs from the Leucine-Rich Repeat family that are known to function in a SOBIR1-dependent manner (i.e. AtRLP1, AtRLP23, AtRLP30, AtRLP42, Cf-4, and Ve1 (Shibuya and Desaki, 2015. Nat. Plants 1:15149, doi:10.1038/nplants.2015.149)) contain a highly negatively charged eJM, while the SOBIR1 eJM is highly positively charged. These complementary charges may be important for the physical interaction and stabilisation of the RLPs/SOBIR1 heterodimers (Gust and Felix, 2014. Curr. Opin. Plant Biol. 21:104, doi:10.1016/j.pbi.2014.07.007).

[0703] We engineered a series of chimeric AtRLP23 variants which contain an eJM domain chosen from the following three SOBIR1-dependent RLPs: Ve1 (from Solanum lycopersicum, GenBank: AAK58682.1), AtRLP1 (AT1G07390.4, from Arabidopsis thaliana Col-0), AtRLP42 (AT3G25020.1 from Arabidopsis thaliana Col-0). A fourth eJM, present in the construct AtRLP23-eJM(EEEE/ADQ−)-3×FLAG (SEQ ID NO: 45), is a chimera between the eJMs of AtRLP23 and AtRLP42.

[0704] 32×10⁴ corn protoplasts, that were prepared as described in Example 1, were co-transfected with 10 μg of reporter construct (ZmUbi::R-GECO1.2::rbcS, SEQ ID NO: 75) and 10 μg of one of the following AtRLP23 constructs: AtRLP23-3×FLAG (SEQ ID NO: 13), AtRLP23-eJM(EEEE/ADQ−)-3×FLAG (SEQ ID NO: 45), AtRLP23-eJMAtRLP1-3×FLAG (SEQ ID NO: 49), AtRLP23-eJMAtRLP42-3×FLAG (SEQ ID NO: 57) or AtRLP23-eJMVe1-3×FLAG (SEQ ID NO: 53). All of the AtRLP23 constructs have an operably linked 2×35S+Ω promoter construct (SEQ ID NO: 72) and an operably linked rbcS terminator (SEQ ID NO: 73)

[0705] 100 μL of protoplasts (32×10⁴ protoplasts) were transferred to each well of a white 96-well microplate (Greiner Bio-One, Lumitrac, model 655075), and then 50 μL of protoplast incubation buffer or 3 μM PpNLP20 peptide (AIMYSWYFPKDSPVTGLGHR, SEQ ID NO: 63; prepared by diluting a 100 μM stock solution with protoplast incubation buffer) was added to each well. Fluorescence was monitored using a fluorimeter equipped with a 100 Hz xenon flash lamp with excitation at 556 nm and emission measured at 585 nm for 30 ms, every 20.2 seconds for 40 minutes. For each fluorescence measurement, the transient change in R-GECO1.2 fluorescence (ΔF) are calculated from background corrected intensity values as (F-Fo), where F represents the average fluorescence intensity of the a batch of protoplasts treated with elicitor, and Fo represents the average fluorescence intensity of the same batch of protoplasts treated with a control solution that lacks the elicitor but is otherwise identical or essentially identical in composition to the solution comprising the elicitor.

[0706] As shown in FIG. 3, transient expression of AtRLP23-3×FLAG, AtRLP23-eJM(EEEE/ADQ−)-3×FLAG, AtRLP23-eJMAtRLP1-3×FLAG, AtRLP23-eJMAtRLP42-3×FLAG or AtRLP23-eJMVe1-3×FLAG, in corn protoplasts led to a Ca²⁺ increase in response to PpNLP20 treatment. Following PpNLP20 treatment, the transient expression of AtRLP23-eJMAtRLP42-3×FLAG conferred a statistically significant increase of response compared to the transient expression of AtRLP23-3×FLAG.

### Example 3: Fusing the AtRLP23 Ectodomain to the Kinase Domain of an RLK can Improve the Activity of AtRLP23

[0707] The functionality of several Leucine-Rich Repeat (LRR)-type RLPs depends on their association with the common adaptor kinase SOBIR1. These RLP/adaptor complexes, formed in the absence of ligands, have been described as bimolecular equivalents of RLKs (Gust and Felix, 2014. Curr. Opin. Plant Biol. 21:104, doi:10.1016/j.pbi.2014.07.007).

[0708] To determine whether RLPs could function in heterologous hosts independently of the presence of their native common adaptor kinase SOBIR1, we evaluated the function of chimeric receptors containing the ectodomain of AtRLP23 and the kinase of AtSOBIR1. Additionally, we also evaluated the function of chimeras containing the ectodomain of AtRLP23 and the kinase domain of other RLKs involved in plant defence to explore whether the function of the AtRLP23 PRR could be improved by other kinase fusions.

[0709] 32×10⁴ corn protoplasts, that were prepared as described in Example 1, were co-transfected with 10 μg of reporter construct (ZmUbi::R-GECO1.2::rbcS, SEQ ID NO: 75) and 10 μg of pUC19 (SEQ ID NO: 74) or one of the following AtRLP23 constructs: AtRLP23-3×FLAG (SEQ ID NO: 13), AtRLP23-OsXA21-3×FLAG (SEQ ID NO: 21), AtRLP23-AtEFR-3×FLAG (SEQ ID NO: 17), AtRLP23+TM-AtEFR-3×FLAG (SEQ ID NO: 33), AtRLP23-AtBAK1-3×FLAG (SEQ ID NO: 25), AtRLP23+TM-AtBAK1-3×FLAG (SEQ ID NO: 37), AtRLP23-AtSOBIR1-3×FLAG (SEQ ID NO: 29) or AtRLP23+TM-AtSOBIR1-3×FLAG (SEQ ID NO: 41). All of the AtRLP23 constructs were expressed under the control of an operably linked 2×35S+Ω promoter construct (SEQ ID NO: 72) and also contained an operably linked rbcS terminator (SEQ ID NO: 73).

[0710] 25 μL of protoplasts (8×10⁴ protoplasts) were transferred to each well of a white 384-well microplate (Corning, low volume non-binding surface, model 3824), and then 12.5 μL of protoplast incubation buffer or 3 μM PpNLP20 peptide (AIMYSWYFPKDSPVTGLGHR, SEQ ID NO: 63; prepared by diluting a 100 μM stock solution with protoplast incubation buffer) was added to each well. Fluorescence was monitored using a fluorimeter equipped with a 100 Hz xenon flash lamp with excitation at 556 nm and emission measured at 585 nm for 30 ms, every 22.6 seconds for 40 minutes. For each fluorescence measurement, the transient increase of fluorescence was measured over background. Background was determined, for a given construct, as the average signal observed in response to buffer. Total transient increase of fluorescence was measured for 40 minutes from the time of treatment.

[0711] As shown in FIG. 4, transient expression of AtRLP23-AtBAK1-3×FLAG, AtRLP23+TM-AtBAK1-3×FLAG or AtRLP23-AtSOBIR1-3×FLAG in corn protoplasts led to a reduced responsiveness to PpNLP20 treatment compared to AtRLP23-3×FLAG. Transient expression of AtRLP23+TM-AtEFR-3×FLAG or AtRLP23-3×FLAG in corn protoplasts led to comparable responsiveness to PpNLP20 treatment. Transient expression of AtRLP23-OsXA21-3×FLAG, AtRLP23-AtEFR-3×FLAG or AtRLP23+TM-AtSOBIR1-3×FLAG in corn protoplasts led to an increased responsiveness to PpNLP20 treatment when compared to AtRLP23-3×FLAG.

[0712] Plant kinases comprise a large multigene family in plants; for example, 940 kinases are present in the Arabidopsis thaliana genome, comprising 3.4% of gene models in this species. The kinase domains of RLKs form a monophyletic group that shares a common origin with animal Pelle and related cytoplasmic kinases (Shiu and Bleeker, 2001. Proc. Natl. Acad. Sci. 98: 10763-10768). In Arabidopsis, 620 sequences related to RLKs were identified and further divided into 46 structural classes defined by their extracellular domains, with the largest group (comprising 14 subgroups) containing leucine-rich repeat (LRR) domains (Shiu and Bleecker, 2001). Some cytoplasmic kinases are also found within the RLK monophyletic grouping. Similar phylogenetic relationships and division into groups and subgroups of RLKs was shown in multiple plant species including monocots and eudicots (reviewed in Lehti-Shiu and Shiu, 2012. Phil. Trans. R. Soc. B. 367: 2619-2639).

[0713] Fusion of the AtRLP23 ectodomain with the kinase domains of AtEFR or OsXA21, belonging to LRR-XII subgroup, and the AtSOBIR kinase domain, from a distinct subgroup with a distant phylogenetic relationship to AtEFR and OsXA21 within the RLKs (Dufayard et al., 2017. Front Plant Sci. 2017. doi: 10.3389/fpls.2017.00381; Fischer et al., 2016. Plant Physiol. 170:1595-610) led to an increased responsiveness to PpNLP20 treatment. Therefore, we expect that many kinase domains within the RLK superfamily, such as, for example, any one or more of those presented in SEQ ID NOS: 77-240 and 561-563 would also perform similarly when fused with AtRLP23 ectodomain. To generate a list of kinase domains representing the RLK superfamily, we used 46 Arabidopsis RLKs representatives as defined by Shiu and Bleecker, 2003. Plant. Physiol. 132: 530-543, supplemented with AtSOBIR1 (At2G31880), OsXA21 (Os11g0559200), and with AtFSL2 replaced by AtEFR (At5G20480). Using full-length protein sequences, we performed a blastp search against a manually curated RLK collection from rice, tomato and Medicago. The hit with highest score from each plant species was selected and all the kinase domains were extracted, resulting in 164 kinase domains from these four plant species.

### Example 4: AtRLP23-eJMAtRLP42-AtEFR Function can be Assayed in Protoplasts Using an Aequorin Reporter

[0714] Following ligand detection by PRR, the transient increase of cytosolic Ca²⁺ concentration can be monitored in a population of plant protoplasts expressing the genetically encoded proteinaceous bioluminescent Ca²⁺ sensor apoaequorin from the jellyfish Aequorea victoria. The complex formed between apoaequorin and its prosthetic group, the luciferin coelenterazine, is termed aequorin, which upon binding of three Ca²⁺ ions emits light at a wavelength of 470 nm.

[0715] Corn protoplasts were isolated from leaves of 10-day old maize seedlings that had been kept in the dark at 25° C. essentially as described in Sheen, 1990. Plant Cell 2:1027, doi:10.1105/tpc.2.10.1027. 32×10⁴ corn (Zea mays) protoplasts were co-transfected with 10 μg of PRR construct (AtRLP23-eJMAtRLP42-AtEFR-3×FLAG, SEQ ID NO: 61) and 10 μg of reporter construct (ZmUbi::Apoaequorin::rbcS, SEQ ID NO: 76) by PEG-mediated transformation using an adaptation of the method of Yoo et al. (2007) Nat Protocols 2:1565-1572. After overnight-resting, transiently transfected corn protoplasts were incubated for 2 hours with 1 μM coelenterazine essentially as described for Arabidopsis protoplasts in Maintz et al., 2014. Plant Cell Physiol. 55:1813, doi:10.1093/pcp/pcu112. 100 μL of transfected protoplasts (32×10⁴ protoplasts) were transferred to each well of a white 96-well microplate (Greiner Bio-One, Lumitrac, model 655075), and then 50 μL of protoplast incubation buffer or 3 uM PpNLP20 peptide (AIMYSWYFPKDSPVTGLGHR, SEQ ID NO: 63; prepared by diluting a 100 μM stock solution with protoplast incubation buffer) was added to each well. Luminescence was monitored immediately and for 60 minutes using a High Resolution Photon Counting System (HRPCS) camera.

[0716] As shown in FIG. 5, transient expression of AtRLP23-eJMAtRLP42-AtEFR-3×FLAG (schematically represented in FIG. 1) in corn protoplasts led to a significant Ca²⁺ increase in response to PpNLP20 treatment but not in response to the protoplast incubation buffer. These results demonstrate that AtRLP23-eJMAtRLP42-AtEFR-3×FLAG expression in corn protoplast led to PpNLP20 perception.

### Example 5: AtRLP23 Also Confers Recognition of NLP20 Peptides from Four Corn Pathogens

[0717] Corn stalk and ear rots are caused by Colletotrichum graminicola, Fusarium verticillioides, Fusarium graminearum and Stenocarpella maydis while Aspergillus ear rot is caused by Aspergillus flavus. To determine if the ectopic expression of AtRLP23 in corn could lead to the perception of NLP epitopes present in these fungal pathogen of corn, we have searched their genomes for candidate proteins with homology to the NEP1 protein from Fusarium oxysporum f. sp. erythroxyli. (GenBank: AAC97382.1). We identified several candidate genes (Table 1) and ordered the synthetic peptides corresponding to the orthologous regions of the PpNLP24 epitope (described as 10 times more active than PpNLP20 in Bohm et al., 2014. PLoS Pathog. 10:e1004491, doi:10.1371/journal.ppat.1004491).

TABLE 1
NLP peptides from identified from corn pathogens

| | | |
|---|---|---|
| Gene | Peptide | Sequence |

Phytophthora parasitica

| | |
|---|---|
| PpNLP20 | AIMYSWYFPKDSPVTGLGHR |
| | (SEQ ID NO: 63) |

Colletotrichum graminicola M1.001

| | | |
|---|---|---|
| GLRG_10303 | CgNLP24b | AIMYAYYMPKDSPSPGLGHRHDWE |
| | | (SEQ ID NO: 64) |

Fusarium graminearum PH-1

| | | |
|---|---|---|
| FGSG_06017 | FgNLP24c | AIMYSWYMPKDSPSPGLGHRHDWE |
| | | (SEQ ID NO: 65) |

Fusarium verticillioides 7600

| | | |
|---|---|---|
| FVEG_04647 | FvNLP24a | IMYSWYMPKDSPSPGLGHRHDWE |
| | | (SEQ ID NO: 66) |

Stenocarpella maydis A1-1

| | |
|---|---|
| SmNLP24 | VVMYCWYMPKDQPLDGNTAGGHRHE |
| | FE (SEQ ID NO: 67) |

Aspergillus flavus NRRL3357

| | | |
|---|---|---|
| AFLA_096450 | AfNLP24a | GIMYAWYMPKDMPNSGVSTGAHRHD |
| | | WE (SEQ ID NO: 68) |
| AFLA_054320 | AfNLP24b | ALMYSWYFPKDEPSTGLGHRHDWE |
| | | (SEQ ID NO: 69) |
| AFLA_013750 | AfNLP24c | ALMYSWYFPKDQAAPGMGHRHDWE |
| | | (SEQ ID NO: 70) |

Aspergillus parasiticus SU-1

| | | |
|---|---|---|
| P875_00075739 | ApNLP24a | GIMYAWYMPKDMPNSGVSAGAHRHD |
| | | WE (SEQ ID NO: 71) |

[0718] A sample comprising 32×10⁴ corn protoplasts, that were prepared as described in Example 4, were co-transfected with 10 μg of reporter construct ZmUbi::Apoaequorin::rbcS (SEQ ID NO: 76) and 10 μg of either AtRLP23-eJMAtRLP42-3×FLAG (SEQ ID NO: 57) or AtRLP23-eJMAtRLP42-AtEFR-3×FLAG (SEQ ID NO: 61). After incubation as described in Example 4, the protoplasts were treated with 50 μL of either protoplast incubation buffer, 3 μM PpNLP20 peptide (AIMYSWYFPKDSPVTGLGHR, SEQ ID NO: 63), 3 μM CgNLP24b peptide (AIMYAYYMPKDSPSPGLGHRHDWE, SEQ ID NO: 64), 3 μM FgNLP24c peptide (AIMYSWYMPKDSPSPGLGHRHDWE, SEQ ID NO: 65), 3 μM FvNLP24a peptide (IMYSWYMPKDSPSPGLGHRHDWE, SEQ ID NO: 66), or 3 μM SmNLP24 peptide (VVMYCWYMPKDQPLDGNTAGGHRHEFE, SEQ ID NO: 67). Luminescence was assayed as described above.

[0719] As shown in FIG. 6, transient expression of AtRLP23-eJMAtRLP42-3×FLAG (SEQ ID NO: 57) or AtRLP23-eJMAtRLP42-AtEFR-3×FLAG (SEQ ID NO: 61) in corn protoplasts led to a Ca²⁺ increase in response to PpNLP20 (from Phytophthora parasitica), CgNLP24b (from Colletotrichum graminicola M1.001), FgNLP24c (from Fusarium graminearum PH-1), FvNLP24a (from Fusarium verticillioides 7600) and SmNLP24 (from Stenocarpella maydis A1-1). For these five peptides, a stronger response was observed in the presence of AtRLP23-eJMAtRLP42-AtEFR-3×FLAG than in the presence of AtRLP23-eJMAtRLP42-3×FLAG.

[0720] The response of AtRLP23-eJMAtRLP42-AtEFR-3×FLAG (SEQ ID NO: 61) to further NLPs from corn pathogens was then assayed as described above. As shown in FIG. 7, transient expression of AtRLP23-eJMAtRLP42-AtEFR-3×FLAG (SEQ ID NO: 61) in corn protoplasts led to a Ca²⁺ increase in response to PpNLP20 (from Phytophthora parasitica), SmNLP24 (from Stenocarpella maydis A1-1), AfNLP24a (from Aspergillus flavus NRRL3357), ApNLP24a (from Aspergillus parasiticus SU-1), AfNLP24b (from Aspergillus flavus NRRL3357 and Aspergillus parasiticus SU-1) and AfNLP24c (from Aspergillus flavus NRRL3357 and Aspergillus parasiticus SU-1).

### Example 6: Fusions of the AtRLP23 Ectodomain with Kinase Domains of RLK Superfamily Members

[0721] To test if fusion of other kinases within the RLK superfamily (described above in Example 3) with the AtRLP23 ectodomain leads to recognition of at least one of NLP sequences, we generated chimeric constructs fusing AtRLP23 ectodomain (SEQ ID NO: 560) and eJM with TM and kinase domains from OsCERK1 (SEQ ID NOS: 331, 433, and 239, respectively), Os01g49614 (SEQ ID NOS: 369, 518, and 122, respectively), OsPi-d2 (SEQ ID NOS: 564, 567, and 561, respectively), Medtr3g3g095100 (SEQ ID NOS: 310, 514, and 224, respectively), Mt7g073660 (SEQ ID NOS: 279, 438, and 172, respectively), AtWAK1 (SEQ ID NOS: 364, 512, and 107, respectively), AtPEPR1 (SEQ ID NOS: 565, 568, and 562, respectively), AtLYK5 (SEQ ID NOS: 566, 568, and 563, respectively), AtExtensin (SEQ ID NOS: 273, 527, and 133, respectively), AtC_lectin (SEQ ID NOS: 350, 506, and 128, respectively), Solyc01g108000 (SEQ ID NOS: 280, 499, and 233, respectively), or Solyc06g051030 (SEQ ID NOS: 253, 427, and 221, respectively).

[0722] 32×10⁴ corn protoplasts samples prepared as described in Example 4, were co-transfected with 10 μg of reporter construct ZmUbi::Apoaequorin::rbcS (SEQ ID NO: 76) and 10 μg of each one of the chimeras described above. After incubation as described in Example 4, the protoplasts were treated with 50 μL of either protoplast incubation buffer, or 3 μM CgNLP24b peptide (SEQ ID NO: 64), 3 μM FgNLP24c peptide (SEQ ID NO: 65), 3 μM FvNLP24a peptide (SEQ ID NO: 66) or 3 μM SmNLP24 peptide (SEQ ID NO: 67). Luminescence was assayed as described above.

[0723] As shown in FIG. 8, only transient expression of AtRLP23-AtPEPR1-3×FLAG chimera (SEQ ID NO: 572) in corn protoplasts led to a Ca²⁺ burst in response to all tested NLP peptides (data not shown for the other chimeras). The response with the AtRLP23-AtPEPR1-3×FLAG chimera was similar (FgNLP24c) or weaker (all other NLPs) in strength to the response to control construct AtRLP23-ejmAtRLP42-AtEFR-3×FLAG. However, the increase in Ca²⁺ for AtRLP23-AtPEPR1-3×FLAG chimera was statistically significant compared to control buffer treatment for all peptides tested.

### Example 7: Transgenic Corn Plants Expressing Modified AtRLP23 Genes have Enhanced Resistance to Diplodia Stalk Rot

[0724] Transgenic corn (Zea mays) plants at the T1 stage expressing modified AtRLP23 genes under the control of a constitutive promoter were generated and grown in the greenhouse. At the VT growth stage, two nodes were infected by wounding the stalk and injecting a suspension of Diplodia maydis pathogen inoculum into the wound. Sixteen plants from each event were inoculated. Corn plants were evaluated for Diplodia stalk rot approximately 2-3 weeks after inoculation. Stalks were harvested, leaves were removed, and the stalks were split longitudinally. Disease severity was reported as the percent necrosis of the cut surface and is compared to the percent necrosis of non-transformed plants as shown in FIGS. 9-11. Transgenic corn plants expressing modified AtRLP23 genes have enhanced disease resistance to Diplodia maydis.

[0725] The article “a” and “an” are used herein to refer to one or more than one (i.e., to at least one) of the grammatical object of the article. By way of example, “an element” means one or more element.

[0726] Throughout the specification the word “comprising,” or variations such as “comprises” or “comprising,” will be understood to imply the inclusion of a stated element, integer or step, or group of elements, integers or steps, but not the exclusion of any other element, integer or step, or group of elements, integers or steps.

[0727] All publications and patent applications mentioned in the specification are indicative of the level of those skilled in the art to which this invention pertains. All publications and patent applications are herein incorporated by reference to the same extent as if each individual publication or patent application was specifically and individually indicated to be incorporated by reference.

[0728] Although the foregoing invention has been described in some detail by way of illustration and example for purposes of clarity of understanding, it will be obvious that certain changes and modifications may be practiced within the scope of the appended claims.

The application's sequence listing, which the Patent Office published only in electronic form, follows.

SEQUENCE LISTING (573 sequences)

SEQ ID NO: 1 - DNA, 2670 bp, Arabidopsis thaliana
atgtcaaaggcgcttttgcatttgcattttctttctctgtttttactctgttgtgtctgccattcaagtatttttactttaaattttcattttactggtattgtggcctgtcgtccccaccagattcaagccttcacgaagttcacgaacgagtttgacacccgcggttgcaacaacagtgacacctttaatggagtctggtgcgataactcgacgggtgcggtcgcagtgctacaactaaggaagtgtctcagtggaactttgaagtccaacagtagcctcttcgggtttcatcaactccgttacgttgatctccaaaacaacaacttaacctcctcttcactcccttccgggtttggaaatctcaaaagattagagggcttgtttctttcctctaatggcttcctcggccaagttccttcctcattcagtaacctaacaatgcttgctcaattagacctttcttataacaagctcactggtagtttcccacttgtccggggtctaagaaagctcattgttttagacctttcatataatcacttctccggaactctgaatccaaacagtagcctctttgagttgcaccagctacgttaccttaatctcgcttttaacaactttagttcctcactcccttccaaatttggcaatctccatagattagagaacttgattctttcctctaatggcttttctggtcaagttccttccacaattagtaacctgacccggttaactaagttgtaccttgaccaaaacaagctcactagtagtttcccacttgtacagaatctaaccaacctctacgaattagacctttcatataataagttctttggagtcatcccttcttctctcctcactctgcctttcttagcacatcttgctctacgtgaaaacaatcttgctggttctgttgaagtttcaaactcctctacctcatctaggctcgaaatcatgtatctcgggtctaaccattttgaaggacaaatcctagagcctatctcaaagctcatcaacctcaagcatcttgacctttctttcctaaacacaagctacccaatagacttaaaactcttctcctccctcaaatctttgcggtcactggatctttctggaaacagtatatcttcggccagtttaagttcagattcatacatcccgttgaccctggaaatgttgaccttgaggcactgtgacatcaacgagttccccaacatcttaaagaccctcaaggagttggtgtatatagacatatccaacaacagaatgaaagggaagatccctgagtggttatggagcctacctcttctacagtcagtaactcttggaaataattatttcacaggtttccaaggttcggcggagattttagtaaattcatcagtgctgctattatatttggattcaaacaattttgaaggagcacttcctgatctaccactctctatcaaaggcttcggtgtggctagtaatagtttcacaagtgagatacctctttcaatctgcaaccgaagctctctcgctgctattgatctatcctacaacaacttcactggtcccattcctccatgtttgcgtaatttggaacttgtgtatctccggaacaacaacctggaaggaagtatccctgacgcgctctgtgatggtgcctctttacggacactcgatgttagccataaccgattaacagggaagcttccaaggtcttttgtaaactgctcatcgctaaagtttctaagcgttataaacaacagaattgaagatacgtttccgttctggctcaaagctttaccgaatttgcaagtccttactcttcgctcaaacagattttatggtcctatatctcctccgcatcaaggtcctctcgggtttccagagctgcggatatttgaaatatctgacaataagtttacaggaagcttgccaccaaactactttgtgaactggaaagcatcatcacgcacgatgaatcaagatgggggtttatatatggtatacgaggagaagctgttcgacgaaggcggctatggttatacagatgctttagatttgcaatacaaaggtctacacatggagcaagctaaggccctcacttcctacgccgccattgatttttctggaaatagactcgaaggacagattcctgaatctattggactcttgaaggcactgattgcagtcaatatatcaaacaacgccttcacaggccatattcccctgtctatggccaatcttgagaatctcgagtcactagacatgtcaagaaaccaactctcggggactattcctaatggactagggagcatttcgtttttggcgtacatcaacgtgtctcacaaccaactcacgggtgaaataccacaaggaacacagattactgggcaatctaaatcttccttcgaagggaatgcagggctttgtggtctacctctcaaggaaagttgcttcggcactggtgcacctccgatgtatcaccaaaagcaagaggacaaagaagaagaagaagaagaagaagaagaagaagaagaagtgttgaacgggagagcagtggcaatagggtatggatctggattattgcttggattggcaatagcacaagttattgcttcatacaaaccggagtggcttgtcaagataattggtctgaataaacgcagaaagcgt

SEQ ID NO: 2 - protein, 890 aa, Arabidopsis thaliana
MSKALLHLHFLSLFLLCCVCHSSIFTLNFHFTGIVACRPHQIQAFTKFTNEFDTRGCNNSDTFNGVWCDNSTGAVAVLQLRKCLSGTLKSNSSLFGFHQLRYVDLQNNNLTSSSLPSGFGNLKRLEGLFLSSNGFLGQVPSSFSNLTMLAQLDLSYNKLTGSFPLVRGLRKLIVLDLSYNHFSGTLNPNSSLFELHQLRYLNLAFNNFSSSLPSKFGNLHRLENLILSSNGFSGQVPSTISNLTRLTKLYLDQNKLTSSFPLVQNLTNLYELDLSYNKFFGVIPSSLLTLPFLAHLALRENNLAGSVEVSNSSTSSRLEIMYLGSNHFEGQILEPISKLINLKHLDLSFLNTSYPIDLKLFSSLKSLRSLDLSGNSISSASLSSDSYIPLTLEMLTLRHCDINEFPNILKTLKELVYIDISNNRMKGKIPEWLWSLPLLQSVTLGNNYFTGFQGSAEILVNSSVLLLYLDSNNFEGALPDLPLSIKGFGVASNSFTSEIPLSICNRSSLAAIDLSYNNFTGPIPPCLRNLELVYLRNNNLEGSIPDALCDGASLRTLDVSHNRLTGKLPRSFVNCSSLKFLSVINNRIEDTFPFWLKALPNLQVLTLRSNRFYGPISPPHQGPLGFPELRIFEISDNKFTGSLPPNYFVNWKASSRTMNQDGGLYMVYEEKLFDEGGYGYTDALDLQYKGLHMEQAKALTSYAAIDFSGNRLEGQIPESIGLLKALIAVNISNNAFTGHIPLSMANLENLESLDMSRNQLSGTIPNGLGSISFLAYINVSHNQLTGEIPQGTQITGQSKSSFEGNAGLCGLPLKESCFGTGAPPMYHQKQEDKEEEEEEEEEEEEVLNGRAVAIGYGSGLLLGLAIAQVIASYKPEWLVKIIGLNKRRKR

SEQ ID NO: 3 - DNA, 2670 bp, Arabidopsis thaliana
atgtctaaatcgcttttgcgtttgacgtttctcttgctactcttactctcttgtgtctccccttcaagcttcttcacttttaataaccctgctgaaggtcctggtgcttgtggtccccaccagattcaagcctttacgcagttcaagaacgagtttgatactcgtgcttgcaaccatagtgacccttggaatggagtgtggtgcgataactccacgggtgcggtcacgatgctacaactcagggcatgtcttagcggaactctgaaacctaacagtagccttttccagtttcatcatctccgttcccttcttctccctcataacaacttcacctcctcttcaatttcttccaagtttggaatgctcaacaacttagaggtattgtctctttcaagtagtggcttcctcgcccaagttcctttttcatttagtaacctaagcatgctttccgctttagacctttccaaaaacgagctcactggtagtttatcatttgtgcggaatctacgcaagctcagagttttagatgtttcttataatcacttctctggaattttgaatcccaatagtagcctctttgagttgcaccacctcatttaccttaatctccgttacaacaacttcacctcctcttcactcccttatgaatttggcaatctcaacaaactagaggtcttggatgtttcctctaatagcttcttcggtcaagttcctcccactattagtaacctaacccagttaaccgagttgtaccttcccttgaacgacttcactggtagtcttccgcttgtacaaaatctaaccaagctctccattctacatctttttggtaatcacttctctggaacaatcccttcttctctcttcactatgcctttcttatcatcaatttatttaaataaaaacaatctcagtggttctattgaagttcctaactcctcttcctcatcaaggctagagcatttgtacctagggaaaaaccatttaggaaaaatcctagagcctatcgcaaagcttgttaaccttaaagagctcgacctttctttcctaaacacaagccacccaattgacttaagtctcttctcctctctcaaatctttgttgctcctcgatctttccggtgattggatatcaaaggctagtttaactttggattcatacattccatctaccctggaagtgttgcgtttggagcattgcgacatcagtgagttcccaaacgtcttcaagacccttcataatttggagtatattgccttatccaacaatagaatcagtggaaaatttccagagtggttatggagccttcctcgactgagctcagtgttcattacagataatttgttaactggctttgaagggtcatcagaagttttagtaaattcatcagtgcagatcttaagtttggatacaaacagtttagaaggggcactcccgcatctaccgctctctatcaactatttctctgcaatagacaatagattcggaggcgacatacctctttcaatctgtaatagaagctcgcttgatgtccttgatctaagctacaacaacttcagcggacaaattcctccatgtctgagtaacttattgtatttgaaactccgaaagaacaacttggaaggaagtattcctgacaagtattatgtggatacgcctctacgatcattcgacgttggttacaatcgattaacagggaagctcccaaggtctcttataaattgctcagctctacagtttctaagtgtggaccacaacggaatcaaagatacatttcctttttaccttaaggctttaccgaaattgcaagtccttctcctcagttcaaacgaattctatggtcctctatctcctcctaatcaaggtcctctgggttttcctgagctgcggatactggagatagctggtaataaactaaccggaagcttgcccccagatttttttgtgaattggaaagcatcatcacacacaatgaatgaagatctgggtctatatatggtatatagcaaggttattttcgggaactatcacctcacctattatgaaactatagatttacgatataaaggtctatctatggagcaggagaacgtccttacttcctcagccaccattgatctttctggaaacagacttgaaggagaaattcctgaatctctcggtctcttaaaggcattgatcgcactcaacttatcgaacaacgccttcacaggccatattcctctgtctttggctaatcttaagaagatcgagtcactagacctatcaagtaaccaactctcagggacaattcctaatggactagggactctctcgtttttggcgtacatgaacgtgtctcacaaccaactcaacggtgaaataccacaaggaacacaaataactgggcaacctaaatcgtccttcgaaggaaatgcagggctttgtggttttcctcttcaagaaagttgctttgggactaacgcgccaccagcacagaagcctaaagaagaagaagaagcggaagaagatgagcaagagttaaactggaaagcagtggcaatagggtatggggttggagtgttacttggattggcgatagcacaactcattgcttcatacaaaccagagtggctagtttgtctggttaaaagcagaaacccgttacgatctttttttggttttgagtat

SEQ ID NO: 4 - protein, 890 aa, Arabidopsis thaliana
MSKSLLRLTFLLLLLLSCVSPSSFFTFNNPAEGPGACGPHQIQAFTQFKNEFDTRACNHSDPWNGVWCDNSTGAVTMLQLRACLSGTLKPNSSLFQFHHLRSLLLPHNNFTSSSISSKFGMLNNLEVLSLSSSGFLAQVPFSFSNLSMLSALDLSKNELTGSLSFVRNLRKLRVLDVSYNHFSGILNPNSSLFELHHLIYLNLRYNNFTSSSLPYEFGNLNKLEVLDVSSNSFFGQVPPTISNLTQLTELYLPLNDFTGSLPLVQNLTKLSILHLFGNHFSGTIPSSLFTMPFLSSIYLNKNNLSGSIEVPNSSSSSRLEHLYLGKNHLGKILEPIAKLVNLKELDLSFLNTSHPIDLSLFSSLKSLLLLDLSGDWISKASLTLDSYIPSTLEVLRLEHCDISEFPNVFKTLHNLEYIALSNNRISGKFPEWLWSLPRLSSVFITDNLLTGFEGSSEVLVNSSVQILSLDTNSLEGALPHLPLSINYFSAIDNRFGGDIPLSICNRSSLDVLDLSYNNFSGQIPPCLSNLLYLKLRKNNLEGSIPDKYYVDTPLRSFDVGYNRLTGKLPRSLINCSALQFLSVDHNGIKDTFPFYLKALPKLQVLLLSSNEFYGPLSPPNQGPLGFPELRILEIAGNKLTGSLPPDFFVNWKASSHTMNEDLGLYMVYSKVIFGNYHLTYYETIDLRYKGLSMEQENVLTSSATIDLSGNRLEGEIPESLGLLKALIALNLSNNAFTGHIPLSLANLKKIESLDLSSNQLSGTIPNGLGTLSFLAYMNVSHNQLNGEIPQGTQITGQPKSSFEGNAGLCGFPLQESCFGTNAPPAQKPKEEEEAEEDEQELNWKAVAIGYGVGVLLGLAIAQLIASYKPEWLVCLVKSRNPLRSFFGFEY

SEQ ID NO: 5 - DNA, 3093 bp, Arabidopsis thaliana
atgaagctgtccttttcacttgttttcaatgctctcacgttgcttcttcaagtttgcatctttgctcaagccaggttttctaatgagactgatatgcaagctttgcttgagttcaagtctcaagtttctgaaaacaacaagagagaggtcttggcttcatggaatcactcctccccattttgtaattggattggagtcacatgtggccgcaggagagaaagagttataagtttgaaccttggaggattcaagttaaccggtgtgatctcaccctccattggtaatctctcctttcttagattacttaatcttgcagacaactcttttggaagtaccatccctcaaaaggtgggaaggctatttaggcttcagtacttgaacatgagctataatcttctcgaaggaaggattccgtctagtctttctaactgctctagactgtcgaccgttgatttatcgtcaaaccatcttggacatggtgttccttcagaactaggttcactttctaagcttgccattctggatcttagcaaaaacaaccttactggaaattttcctgcatctttaggaaacttgacgtcacttcagaagcttgactttgcatataaccagatgagaggtgagattccagacgaagtagctagattgactcaaatggtgtttttccaaatagcactgaatagtttttcaggtggttttcctcctgcattgtacaacatctcctctcttgagtctctatctctagctgacaatagcttttcgggtaatcttagggctgattttggttatcttctaccaaatctaagaagacttcttttgggaacaaatcagttcactggagctattcccaaaacacttgccaatatctcaagccttgaaaggtttgatatctcatctaattacctgtctggtagtatccctttgagctttggaaagttacgtaatctgtggtggttagggattcgtaataactctcttggaaataactcgtccagtggtcttgaatttattggggctgtggcgaactgcactcaattagagtacttagatgttggttacaatagacttggaggtgagcttcctgcttctatagccaatctgtccactacattgactagtctgttccttggacaaaatcttatctctggaaccattcctcatgacatcgggaatcttgtaagcctgcaagaactcagcttagaaacaaatatgttgagtggagaacttcccgtctctttcgggaagcttttgaacttgcaggttgtggatctgtattcaaatgcaatatcgggggaaataccatcttattttggcaacatgactcggttgcagaagctccatttgaatagcaatagtttccacggaagaatccctcagagtcttggacgttgtcgatacttgctagacctgtggatggatacaaataggttgaatgggactatacctcaggaaatactgcaaattccatccctcgcttacatagatttgtcaaacaatttcttgacaggccattttccagaagaagttggaaagttagaacttcttgttggactaggtgcttcgtacaacaaattatcaggaaagatgccacaagctatagggggttgtctttcgatggaatttctctttatgcaaggaaattcgtttgacggagccattccagatataagccggttggtaagcctaaagaatgttgacttctccaacaacaatctctctggccggatacctcgatatctggccagtcttccttcgctgcgaaatctgaatctttctatgaacaagtttgagggaagggtgccaacaacaggagtgtttcgaaatgctacagcagtttctgtttttggtaacacaaatatttgcggaggcgtccgagaaatgcaactaaagccatgcattgtacaggcatctccaaggaagagaaagcctctgtcagttagaaagaaagttgtcagtggtatttgtataggtatagcttcgcttttgttaatcataattgtggcttctctgtgttggttcatgaagaggaaaaagaaaaacaatgccagtgatggtaacccatctgattctactactttggggatgttccatgagaaggtaagttatgaagagcttcatagtgcaacaagtcgcttctcttcaaccaatttgattggttcaggcaatttcggtaatgtgtttaaaggattgcttggccctgagaataaactcgtcgcggttaaagttttgaacctcctaaagcatggagcgacgaaaagctttatggcggaatgtgaaaccttcaagggtatacgacatcgtaaccttgtaaaactgataacggtttgttcaagccttgattccgagggaaatgatttcagagctctggtctatgagttcatgccaaaaggaagtctggatatgtggctgcagctagaagatctggaaagggtaaacgatcactcgagatctttaacacccgcagagaaactcaacatagcaatagatgtggcttcagctttggagtatctgcacgttcattgtcatgaccctgtagctcactgtgatattaagccaagcaacattcttctagacgatgatctgactgctcatgttagtgactttggtttggctcagctcctctataaatacgatcgagaatcctttctaaaccagtttagttctgctggtgtcagaggcaccattggctatgccgcgccagagtatggaatgggaggccaaccatcaatacaaggagatgtgtacagcttcggaattctacttttggagatgtttagtggaaagaaaccaacagatgaatcatttgcaggcgattataacctccacagctacacaaagtctatattatcgggttgcacgagcagtggaggcagcaacgccattgatgaggggttgagactggttttgcaggtggggataaagtgttctgaagaatatccgagggataggatgagaacggatgaagcagtacgagaattaatctcaataagatctaagttcttcagttccaagacgactattacagagagtcctcgagatgctccgcaaagttctcctcaggaatggatgttaaatacggacatgcatactatg

SEQ ID NO: 6 - protein, 1031 aa, Arabidopsis thaliana
MKLSFSLVFNALTLLLQVCIFAQARFSNETDMQALLEFKSQVSENNKREVLASWNHSSPFCNWIGVTCGRRRERVISLNLGGFKLTGVISPSIGNLSFLRLLNLADNSFGSTIPQKVGRLFRLQYLNMSYNLLEGRIPSSLSNCSRLSTVDLSSNHLGHGVPSELGSLSKLAILDLSKNNLTGNFPASLGNLTSLQKLDFAYNQMRGEIPDEVARLTQMVFFQIALNSFSGGFPPALYNISSLESLSLADNSFSGNLRADFGYLLPNLRRLLLGTNQFTGAIPKTLANISSLERFDISSNYLSGSIPLSFGKLRNLWWLGIRNNSLGNNSSSGLEFIGAVANCTQLEYLDVGYNRLGGELPASIANLSTTLTSLFLGQNLISGTIPHDIGNLVSLQELSLETNMLSGELPVSFGKLLNLQVVDLYSNAISGEIPSYFGNMTRLQKLHLNSNSFHGRIPQSLGRCRYLLDLWMDTNRLNGTIPQEILQIPSLAYIDLSNNFLTGHFPEEVGKLELLVGLGASYNKLSGKMPQAIGGCLSMEFLFMQGNSFDGAIPDISRLVSLKNVDFSNNNLSGRIPRYLASLPSLRNLNLSMNKFEGRVPTTGVFRNATAVSVFGNTNICGGVREMQLKPCIVQASPRKRKPLSVRKKVVSGICIGIASLLLIIIVASLCWFMKRKKKNNASDGNPSDSTTLGMFHEKVSYEELHSATSRFSSTNLIGSGNFGNVFKGLLGPENKLVAVKVLNLLKHGATKSFMAECETFKGIRHRNLVKLITVCSSLDSEGNDFRALVYEFMPKGSLDMWLQLEDLERVNDHSRSLTPAEKLNIAIDVASALEYLHVHCHDPVAHCDIKPSNILLDDDLTAHVSDFGLAQLLYKYDRESFLNQFSSAGVRGTIGYAAPEYGMGGQPSIQGDVYSFGILLLEMFSGKKPTDESFAGDYNLHSYTKSILSGCTSSGGSNAIDEGLRLVLQVGIKCSEEYPRDRMRTDEAVRELISIRSKFFSSKTTITESPRDAPQSSPQEWMLNTDMHTM

SEQ ID NO: 7 - DNA, 1923 bp, Arabidopsis thaliana
atggctgttcccacgggaagcgccaatctctttctccggcctctcatcctcgccgttctctcctttcttcttctctcttcattcgtctcctctgttgagtggctcgatatcgattcctcagatctcaaagctcttcaggtcatcgaaacagagctcggagtcaacagtcaacgttcttcggccagtgatgtcaacccttgcggtcgccgaggagttttctgcgagagacggcactctgccaccaccggagaatacgttctccgtgtcacgaggctcgtctaccgatccaggagcttgacggggactatctctccggtcatcggaatgttgtcggagctcaaggaacttactttgtctaataaccagttggtcaacgctgttccggtggatatcttaagctgtaagcaacttgaagttcttgatcttcggaaaaatagattttccggtcagattccgggaaacttttctagtttgagccgtcttcgaatccttgatctctcttcgaacaagttatccgggaacttgaatttcttgaagaatctacgcaatctggagaatctctctgttgcaaacaatctcttctcaggcaaaatcccggaacaaattgtgtcgttccacaatctccggttctttgatttctccggaaaccggtatttggaaggtccggctccggttatgagcagtatcaagcttcagacatctccacatcaaacaagacacattcttgctgaaactccaacttcaagtcccacgaacaaacccaacaacagcactacatcaaaagctccaaagggagctccaaaaccagggaagttgaagaagaagaagaagaagagcaagaagaagaaagtagcggcatggatcttagggtttgtcgttggagccataggaggaacaatctctgggtttgtcttctcggtgttgttcaaattgattattcaagcaataagaggatcagaaaaaccaccaggtccttccatattcagcccattgatcaagaaagctgaagatttagctttcttggagaatgaagaagcgttagcttctctggagatcataggaagaggaggttgtggagaagttttcaaagctgaactaccaggaagcaatgggaagatcatagctgtgaagaaagtgatccaaccgcctaaagacgccgatgaactaacagatgaagattccaagtttctgaacaagaaaatgaggcaaattagatccgagatcaacacagtcggccatatccggcaccggaatcttctcccattgttagcacacgtgtcaagacccgagtgccactacctcgtttacgagtacatggaaaaggggagtttgcaagatatattgactgacgtacaagctggaaatcaagaactaatgtggccagcgaggcacaagattgctttaggtatagctgcagggcttgagtaccttcacatggatcataacccacgaatcattcacagagacttaaagccagccaatgttcttcttgatgatgacatggaagccagaatttcagatttcggactggcaaaggcaatgccagatgcagtcacacatattacaacctcgcatgttgcaggtactgtgggatacatagcaccagagttttatcaaacccacaagttcacagataaatgtgatatctatagttttggagtgattcttgggattctggtgattgggaagcttccttcagatgagttttttcagcatactgacgagatgagtctgataaagtggatgaggaacataataacatcggaaaatcctagccttgcgattgatccgaagttgatggatcaaggattcgatgaacagatgcttctggttctgaagatcgcctgttactgtactttggatgatccaaaacagaggccgaacagtaaagatgtcaggaccatgttgtcccagatcaagcac

SEQ ID NO: 8 - protein, 641 aa, Arabidopsis thaliana
MAVPTGSANLFLRPLILAVLSFLLLSSFVSSVEWLDIDSSDLKALQVIETELGVNSQRSSASDVNPCGRRGVFCERRHSATTGEYVLRVTRLVYRSRSLTGTISPVIGMLSELKELTLSNNQLVNAVPVDILSCKQLEVLDLRKNRFSGQIPGNFSSLSRLRILDLSSNKLSGNLNFLKNLRNLENLSVANNLFSGKIPEQIVSFHNLRFFDFSGNRYLEGPAPVMSSIKLQTSPHQTRHILAETPTSSPTNKPNNSTTSKAPKGAPKPGKLKKKKKKSKKKKVAAWILGFVVGAIGGTISGFVFSVLFKLIIQAIRGSEKPPGPSIFSPLIKKAEDLAFLENEEALASLEIIGRGGCGEVFKAELPGSNGKIIAVKKVIQPPKDADELTDEDSKFLNKKMRQIRSEINTVGHIRHRNLLPLLAHVSRPECHYLVYEYMEKGSLQDILTDVQAGNQELMWPARHKIALGIAAGLEYLHMDHNPRIIHRDLKPANVLLDDDMEARISDFGLAKAMPDAVTHITTSHVAGTVGYIAPEFYQTHKFTDKCDIYSFGVILGILVIGKLPSDEFFQHTDEMSLIKWMRNIITSENPSLAIDPKLMDQGFDEQMLLVLKIACYCTLDDPKQRPNSKDVRTMLSQIKH

SEQ ID NO: 9 - DNA, 3159 bp, Solanum lycopersicum
atgaaaatgatggcaactctgtacttcctatggcttctcttgattccctcgtttcaaatcttatcaggataccacattttcttggtttcctctcaatgccttgacgatcaaaagtcattgttgctgcagtttaagggaagcctccaatatgattctactttgtcaaagaaattggcaaaatggaacgacatgacaagtgaatgttgcaattggaatggggttacatgcaatctctttggtcatgtgatcgctttggaactggatgatgagactatttctagtggaattgagaattctagtgcacttttcagtcttcaatatcttgagagcctaaatttggctgacaacatgttcaatgttggcataccagttggtatagccaacctcacaaacttgaagtacctgaatttatccaatgctggttttgtcgggcaaattcctataacattatcaagattaacaaggctagttactcttgatctctcaactattctccctttttttgatcagccacttaaacttgagaatcccaatttgagtcatttcattgagaactcaacagagcttagagagctttaccttgatggggttgatctttcgtctcagaggactgagtggtgtcaatctttatctttacatttgcctaacttgaccgttttgagcttgcgtgattgtcaaatttcaggccctttggatgaatcactttctaagcttcactttctctcttttgtccaacttgaccagaacaatctctctagcacagttcctgaatattttgccaatttctcgaacttgactacattgaccctgggctcttgtaatctacagggaacatttcctgaaagaatctttcaggtatcagttttagagagtttggacttgtcaattaacaagttgcttcgtggtagtattccaatttttttccgaaatggatctctgaggaggatatcactaagctacaccaacttttccggttcattaccagagtccatttcgaaccatcaaaatctatccaggttagagctttctaattgcaatttctatggatcaataccttccacaatggcaaaccttagaaatcttggttatttggatttctccttcaacaatttcactggttctatcccatattttcgactgtccaagaaactcacctacttagacctttcacgtaatggtctaactggtctcttgtctagagctcattttgaaggactctcagagcttgtccacattaatttagggaacaatttactcagcgggagccttcctgcatatatatttgagctcccctcgttgcagcagctttttctttacagaaatcaatttgttggccaagtcgacgaatttcgcaatgcatcctcctctccgttggatacagttgacttgacaaacaaccacctgaatggatcgattccgaagtccatgtttgaaattgaaaggcttaaggtgctctcactttcttccaacttctttagagggacagtgccccttgacctcattgggaggctgagcaacctttcaagactggagctttcttacaataacttgactgttgatgcaagtagcagcaattcaacctctttcacatttccccagttgaacatattgaaattagcgtcttgtcggctgcaaaagttccccgatctcaagaatcagtcatggatgatgcacttagacctttcagacaaccaaatattgggggcaataccaaattggatctggggaattggtggtggaggtctcacccacctgaatctttcattcaatcagctggagtacgtggaacagccttacactgcttccagcaatcttgtagtccttgatttgcattccaaccgtttaaaaggtgacttactaataccaccttgcactgccatctatgtggactactctagcaataatttaaacaattccatcccaacagatattggaaagtctcttggttttgcctcctttttctcggtagcaaacaatggcattactggaataattcctgaatccatatgcaactgcagctaccttcaagttcttgatttctctaacaatgccttgagtggaacaataccaccatgtctactggaatatagtacaaaacttggagtgctgaatcttgggaacaataaactcaatggtgttataccagattcattttcaattggttgtgctctacaaacattagacctcagtgcgaataacttacaaggcaggctgccaaaatcgattgtgaattgtaagttgttggaggtcctgaatgttggaaataacagacttgttgatcatttcccatgcatgttgaggaactcaaacagtctgagggtcctagtcttgcgctccaataaattctatggaaatcttatgtgtgatgtaaccagaaatagctggcagaatctccagatcatagatatagcttccaacaacttcactggtgtgttgaatgcagaattcttttcaaattggagaggaatgatggttgcagatgattacgtggagacaggacgcaatcatatccagtatgagttcttacaactaagtaaattgtactatcaggacacagtgacattaaccatcaaaggcatggagctggagcttgtgaagattctcagggtcttcacatctattgatttctcttccaatagatttcaaggagcgataccagatgctatcgggaatctcagctcactttatgttctgaatctgtcacacaatgcccttgagggaccaatcccaaaatcgattgggaagctacaaatgcttgaatcactagacctgtcaacaaaccacctgtccggggagatcccatcagagcttgcaagtctcacattcttagcagctttgaacttatcgttcaacaaattgtttggcaaaattccatcaactaatcagtttcaaacattctcagcagattcctttgaaggaaacagtggcctatgcgggctccctctcaacaacagttgtcaaagcaatggctcagcctcagagtccctgcctccaccaactccgctaccagactcagatgatgaatgggagttcatttttgcagcagttggatacatagtaggggcagcaaatactatttcagttgtgtggttttacaagccagtgaagaaatggtttgataagcatatggagaaatgcttgctttggttttcaagaaag

SEQ ID NO: 10 - protein, 1053 aa, Solanum lycopersicum
MKMMATLYFLWLLLIPSFQILSGYHIFLVSSQCLDDQKSLLLQFKGSLQYDSTLSKKLAKWNDMTSECCNWNGVTCNLFGHVIALELDDETISSGIENSSALFSLQYLESLNLADNMFNVGIPVGIANLTNLKYLNLSNAGFVGQIPITLSRLTRLVTLDLSTILPFFDQPLKLENPNLSHFIENSTELRELYLDGVDLSSQRTEWCQSLSLHLPNLTVLSLRDCQISGPLDESLSKLHFLSFVQLDQNNLSSTVPEYFANFSNLTTLTLGSCNLQGTFPERIFQVSVLESLDLSINKLLRGSIPIFFRNGSLRRISLSYTNFSGSLPESISNHQNLSRLELSNCNFYGSIPSTMANLRNLGYLDFSFNNFTGSIPYFRLSKKLTYLDLSRNGLTGLLSRAHFEGLSELVHINLGNNLLSGSLPAYIFELPSLQQLFLYRNQFVGQVDEFRNASSSPLDTVDLTNNHLNGSIPKSMFEIERLKVLSLSSNFFRGTVPLDLIGRLSNLSRLELSYNNLTVDASSSNSTSFTFPQLNILKLASCRLQKFPDLKNQSWMMHLDLSDNQILGAIPNWIWGIGGGGLTHLNLSFNQLEYVEQPYTASSNLVVLDLHSNRLKGDLLIPPCTAIYVDYSSNNLNNSIPTDIGKSLGFASFFSVANNGITGIIPESICNCSYLQVLDFSNNALSGTIPPCLLEYSTKLGVLNLGNNKLNGVIPDSFSIGCALQTLDLSANNLQGRLPKSIVNCKLLEVLNVGNNRLVDHFPCMLRNSNSLRVLVLRSNKFYGNLMCDVTRNSWQNLQIIDIASNNFTGVLNAEFFSNWRGMMVADDYVETGRNHIQYEFLQLSKLYYQDTVTLTIKGMELELVKILRVFTSIDFSSNRFQGAIPDAIGNLSSLYVLNLSHNALEGPIPKSIGKLQMLESLDLSTNHLSGEIPSELASLTFLAALNLSFNKLFGKIPSTNQFQTFSADSFEGNSGLCGLPLNNSCQSNGSASESLPPPTPLPDSDDEWEFIFAAVGYIVGAANTISVVWFYKPVKKWFDKHMEKCLLWFSRK

SEQ ID NO: 11 - DNA, 3075 bp, Oryza sativa
atgatatcactcccattattgctcttcgtcctgttgttctctgcgctgctgctctgcccttcaagcagtgacgacgatggtgatgctgccggcgacgaactcgcgctgctctctttcaagtcatccctgctataccaggggggccagtcgctggcatcttggaacacgtccggccacggccagcactgcacatgggtgggtgttgtgtgcggccgccgccgccgccggcacccacacagggtggtgaagctgctgctgcgctcctccaacctgtccgggatcatctcgccgtcgctcggcaacctgtccttcctcagggagctggacctcggcgacaactacctctccggcgagataccaccggagctcagccgtctcagcaggcttcagctgctggagctgagcgataactccatccaagggagcatccccgcggccattggagcatgcaccaagttgacatcgctagacctcagccacaaccaactgcgaggtatgatcccacgtgagattggtgccagcttgaaacatctctcgaatttgtacctttacaaaaatggtttgtcaggagagattccatccgctttgggcaatctcactagcctccaggagtttgatttgagcttcaacagattatcaggagctataccttcatcactggggcagctcagcagtctattgactatgaatttgggacagaacaatctaagtgggatgatccccaattctatctggaacctttcgtctctaagagcgtttagtgtcagagaaaacaagctaggtggtatgatccctacaaatgcattcaaaacccttcacctcctcgaggtgatagatatgggcactaaccgtttccatggcaaaatccctgcctcagttgctaatgcttctcatttgacagtgattcagatttatggcaacttgttcagtggaattatcacctcggggtttggaaggttaagaaatctcacagaactgtatctctggagaaatttgtttcaaactagagaacaagatgattgggggttcatttctgacctaacaaattgctccaaattacaaacattgaacttgggagaaaataacctggggggagttcttcctaattcgttttccaatctttccacttcgcttagttttcttgcacttgaattgaataagatcacaggaagcattccgaaggatattggcaatcttattggcttacaacatctctatctctgcaacaacaatttcagagggtctcttccatcatcgttgggcaggcttaaaaacttaggcattctactcgcctacgaaaacaacttgagcggttcgatcccgttggccataggaaatcttactgaacttaatatcttactgctcggcaccaacaaattcagtggttggataccatacacactctcaaacctcacaaacttgttgtcattaggcctttcaactaataaccttagtggtccaatacccagtgaattattcaatattcaaacactatcaataatgatcaatgtatcaaaaaataacttggagggatcaataccacaagaaatagggcatctcaaaaatctagtagaatttcatgcagaatcgaatagattatcaggtaaaatccctaacacgcttggtgattgccagctcttacggtatctttatctgcaaaataatttgttatctggtagcatcccatcagccttgggtcagctgaaaggtctcgaaactcttgatctctcaagcaacaatttgtcaggccagatacccacatccttagcagatattactatgcttcattccttgaacctttctttcaacagctttgtgggggaagtgccaaccattggtgctttcgcagctgcatccgggatctcaatccaaggcaatgccaaactctgtggtggaatacctgatctacatctgcctcgatgttgtccattactagagaacagaaaacatttcccagttctacctatttctgtttctctggccgcagcactggccatcctctcatcactctacttgcttataacctggcacaagagaactaaaaagggagccccttcaagaacttccatgaaaggccacccattggtctcttattcgcagttggtaaaagcaacagatggtttcgcgccgaccaatttgttgggttctggatcatttggctcagtatacaaaggaaagcttaatatccaagatcatgttgcagtgaaggtactaaagcttgaaaatcctaaggcgctcaagagtttcactgccgaatgtgaagcactacgaaatatgcgacatcgaaatcttgtcaagatagttacaatttgctcgagcattgataacagagggaacgatttcaaagcaattgtgtatgacttcatgcccaacggcagtctggaagattggatacaccctgaaacaaatgatcaagcagaccagaggcacttgaatctgcatcgaagagtgaccatactacttgatgttgcctgcgcactggactatcttcaccgccatggccctgaacctgttgtacactgtgatattaaatcaagcaatgtgctgttagattctgatatggtagcccatgttggagattttgggcttgcaagaatacttgttgatgggacctcattgatacaacagtcaacaagctcgatgggatttatagggacaattggctatgcagcaccagagtatggcgttgggctcattgcatcaacgcatggagatatttacagctatggaattctagtgctggaaatagtaaccgggaagcggccaactgacagtacattcagacccgatttgggcctccgtcagtacgttgaactgggcctacatggcagagtgacggatgttgttgacacgaagctcattttggattctgagaactggctgaacagtacaaataattctccatgtagaagaatcactgaatgcattgtttggctgcttagacttgggttgtcttgctctcaggaattgccatcgagtagaacgccaaccggagatatcatcgacgaactgaatgccatcaaacagaatctctccggattgtttccagtgtgtgaaggtgggagccttgaattc

SEQ ID NO: 12 - protein, 1025 aa, Oryza sativa
MISLPLLLFVLLFSALLLCPSSSDDDGDAAGDELALLSFKSSLLYQGGQSLASWNTSGHGQHCTWVGVVCGRRRRRHPHRVVKLLLRSSNLSGIISPSLGNLSFLRELDLGDNYLSGEIPPELSRLSRLQLLELSDNSIQGSIPAAIGACTKLTSLDLSHNQLRGMIPREIGASLKHLSNLYLYKNGLSGEIPSALGNLTSLQEFDLSFNRLSGAIPSSLGQLSSLLTMNLGQNNLSGMIPNSIWNLSSLRAFSVRENKLGGMIPTNAFKTLHLLEVIDMGTNRFHGKIPASVANASHLTVIQIYGNLFSGIITSGFGRLRNLTELYLWRNLFQTREQDDWGFISDLTNCSKLQTLNLGENNLGGVLPNSFSNLSTSLSFLALELNKITGSIPKDIGNLIGLQHLYLCNNNFRGSLPSSLGRLKNLGILLAYENNLSGSIPLAIGNLTELNILLLGTNKFSGWIPYTLSNLTNLLSLGLSTNNLSGPIPSELFNIQTLSIMINVSKNNLEGSIPQEIGHLKNLVEFHAESNRLSGKIPNTLGDCQLLRYLYLQNNLLSGSIPSALGQLKGLETLDLSSNNLSGQIPTSLADITMLHSLNLSFNSFVGEVPTIGAFAAASGISIQGNAKLCGGIPDLHLPRCCPLLENRKHFPVLPISVSLAAALAILSSLYLLITWHKRTKKGAPSRTSMKGHPLVSYSQLVKATDGFAPTNLLGSGSFGSVYKGKLNIQDHVAVKVLKLENPKALKSFTAECEALRNMRHRNLVKIVTICSSIDNRGNDFKAIVYDFMPNGSLEDWIHPETNDQADQRHLNLHRRVTILLDVACALDYLHRHGPEPVVHCDIKSSNVLLDSDMVAHVGDFGLARILVDGTSLIQQSTSSMGFIGTIGYAAPEYGVGLIASTHGDIYSYGILVLEIVTGKRPTDSTFRPDLGLRQYVELGLHGRVTDVVDTKLILDSENWLNSTNNSPCRRITECIVWLLRLGLSCSQELPSSRTPTGDIIDELNAIKQNLSGLFPVCEGGSLEF

SEQ ID NO: 13 - DNA, 2754 bp, Artificial Sequence
  Encodes fusion protein
atgtcaaaggcgcttttgcatttgcattttctttctctgtttttactctgttgtgtctgccattcaagtatttttactttaaattttcattttactggtattgtggcctgtcgtccccaccagattcaagccttcacgaagttcacgaacgagtttgacacccgcggttgcaacaacagtgacacctttaatggagtctggtgcgataactcgacgggtgcggtcgcagtgctacaactaaggaagtgtctcagtggaactttgaagtccaacagtagcctcttcgggtttcatcaactccgttacgttgatctccaaaacaacaacttaacctcctcttcactcccttccgggtttggaaatctcaaaagattagagggcttgtttctttcctctaatggcttcctcggccaagttccttcctcattcagtaacctaacaatgcttgctcaattagacctttcttataacaagctcactggtagtttcccacttgtccggggtctaagaaagctcattgttttagacctttcatataatcacttctccggaactctgaatccaaacagtagcctctttgagttgcaccagctacgttaccttaatctcgcttttaacaactttagttcctcactcccttccaaatttggcaatctccatagattagagaacttgattctttcctctaatggcttttctggtcaagttccttccacaattagtaacctgacccggttaactaagttgtaccttgaccaaaacaagctcactagtagtttcccacttgtacagaatctaaccaacctctacgaattagacctttcatataataagttctttggagtcatcccttcttctctcctcactctgcctttcttagcacatcttgctctacgtgaaaacaatcttgctggttctgttgaagtttcaaactcctctacctcatctaggctcgaaatcatgtatctcgggtctaaccattttgaaggacaaatcctagagcctatctcaaagctcatcaacctcaagcatcttgacctttctttcctaaacacaagctacccaatagacttaaaactcttctcctccctcaaatctttgcggtcactggatctttctggaaacagtatatcttcggccagtttaagttcagattcatacatcccgttgaccctggaaatgttgaccttgaggcactgtgacatcaacgagttccccaacatcttaaagaccctcaaggagttggtgtatatagacatatccaacaacagaatgaaagggaagatccctgagtggttatggagcctacctcttctacagtcagtaactcttggaaataattatttcacaggtttccaaggttcggcggagattttagtaaattcatcagtgctgctattatatttggattcaaacaattttgaaggagcacttcctgatctaccactctctatcaaaggcttcggtgtggctagtaatagtttcacaagtgagatacctctttcaatctgcaaccgaagctctctcgctgctattgatctatcctacaacaacttcactggtcccattcctccatgtttgcgtaatttggaacttgtgtatctccggaacaacaacctggaaggaagtatccctgacgcgctctgtgatggtgcctctttacggacactcgatgttagccataaccgattaacagggaagcttccaaggtcttttgtaaactgctcatcgctaaagtttctaagcgttataaacaacagaattgaagatacgtttccgttctggctcaaagctttaccgaatttgcaagtccttactcttcgctcaaacagattttatggtcctatatctcctccgcatcaaggtcctctcgggtttccagagctgcggatatttgaaatatctgacaataagtttacaggaagcttgccaccaaactactttgtgaactggaaagcatcatcacgcacgatgaatcaagatgggggtttatatatggtatacgaggagaagctgttcgacgaaggcggctatggttatacagatgctttagatttgcaatacaaaggtctacacatggagcaagctaaggccctcacttcctacgccgccattgatttttctggaaatagactcgaaggacagattcctgaatctattggactcttgaaggcactgattgcagtcaatatatcaaacaacgccttcacaggccatattcccctgtctatggccaatcttgagaatctcgagtcactagacatgtcaagaaaccaactctcggggactattcctaatggactagggagcatttcgtttttggcgtacatcaacgtgtctcacaaccaactcacgggtgaaataccacaaggaacacagattactgggcaatctaaatcttccttcgaagggaatgcagggctttgtggtctacctctcaaggaaagttgcttcggcactggtgcacctccgatgtatcaccaaaagcaagaggacaaagaagaagaagaagaagaagaagaagaagaagaagaagtgttgaacgggagagcagtggcaatagggtatggatctggattattgcttggattggcaatagcacaagttattgcttcatacaaaccggagtggcttgtcaagataattggtctgaataaacgcagaaagcgttcggattataaggaccatgacggagactataaggaccatgacctcgacgctgcagcagcggattataaggacgatgacgataag

SEQ ID NO: 14 - protein, 918 aa, Artificial Sequence
  Fusion protein
MSKALLHLHFLSLFLLCCVCHSSIFTLNFHFTGIVACRPHQIQAFTKFTNEFDTRGCNNSDTFNGVWCDNSTGAVAVLQLRKCLSGTLKSNSSLFGFHQLRYVDLQNNNLTSSSLPSGFGNLKRLEGLFLSSNGFLGQVPSSFSNLTMLAQLDLSYNKLTGSFPLVRGLRKLIVLDLSYNHFSGTLNPNSSLFELHQLRYLNLAFNNFSSSLPSKFGNLHRLENLILSSNGFSGQVPSTISNLTRLTKLYLDQNKLTSSFPLVQNLTNLYELDLSYNKFFGVIPSSLLTLPFLAHLALRENNLAGSVEVSNSSTSSRLEIMYLGSNHFEGQILEPISKLINLKHLDLSFLNTSYPIDLKLFSSLKSLRSLDLSGNSISSASLSSDSYIPLTLEMLTLRHCDINEFPNILKTLKELVYIDISNNRMKGKIPEWLWSLPLLQSVTLGNNYFTGFQGSAEILVNSSVLLLYLDSNNFEGALPDLPLSIKGFGVASNSFTSEIPLSICNRSSLAAIDLSYNNFTGPIPPCLRNLELVYLRNNNLEGSIPDALCDGASLRTLDVSHNRLTGKLPRSFVNCSSLKFLSVINNRIEDTFPFWLKALPNLQVLTLRSNRFYGPISPPHQGPLGFPELRIFEISDNKFTGSLPPNYFVNWKASSRTMNQDGGLYMVYEEKLFDEGGYGYTDALDLQYKGLHMEQAKALTSYAAIDFSGNRLEGQIPESIGLLKALIAVNISNNAFTGHIPLSMANLENLESLDMSRNQLSGTIPNGLGSISFLAYINVSHNQLTGEIPQGTQITGQSKSSFEGNAGLCGLPLKESCFGTGAPPMYHQKQEDKEEEEEEEEEEEEVLNGRAVAIGYGSGLLLGLAIAQVIASYKPEWLVKIIGLNKRRKRSDYKDHDGDYKDHDLDAAAADYKDDDDK

SEQ ID NO: 15 - DNA, 3783 bp, Artificial Sequence
  Encodes fusion protein
atgtcaaaggcgcttttgcatttgcattttctttctctgtttttactctgttgtgtctgccattcaagtatttttactttaaattttcattttactggtattgtggcctgtcgtccccaccagattcaagccttcacgaagttcacgaacgagtttgacacccgcggttgcaacaacagtgacacctttaatggagtctggtgcgataactcgacgggtgcggtcgcagtgctacaactaaggaagtgtctcagtggaactttgaagtccaacagtagcctcttcgggtttcatcaactccgttacgttgatctccaaaacaacaacttaacctcctcttcactcccttccgggtttggaaatctcaaaagattagagggcttgtttctttcctctaatggcttcctcggccaagttccttcctcattcagtaacctaacaatgcttgctcaattagacctttcttataacaagctcactggtagtttcccacttgtccggggtctaagaaagctcattgttttagacctttcatataatcacttctccggaactctgaatccaaacagtagcctctttgagttgcaccagctacgttaccttaatctcgcttttaacaactttagttcctcactcccttccaaatttggcaatctccatagattagagaacttgattctttcctctaatggcttttctggtcaagttccttccacaattagtaacctgacccggttaactaagttgtaccttgaccaaaacaagctcactagtagtttcccacttgtacagaatctaaccaacctctacgaattagacctttcatataataagttctttggagtcatcccttcttctctcctcactctgcctttcttagcacatcttgctctacgtgaaaacaatcttgctggttctgttgaagtttcaaactcctctacctcatctaggctcgaaatcatgtatctcgggtctaaccattttgaaggacaaatcctagagcctatctcaaagctcatcaacctcaagcatcttgacctttctttcctaaacacaagctacccaatagacttaaaactcttctcctccctcaaatctttgcggtcactggatctttctggaaacagtatatcttcggccagtttaagttcagattcatacatcccgttgaccctggaaatgttgaccttgaggcactgtgacatcaacgagttccccaacatcttaaagaccctcaaggagttggtgtatatagacatatccaacaacagaatgaaagggaagatccctgagtggttatggagcctacctcttctacagtcagtaactcttggaaataattatttcacaggtttccaaggttcggcggagattttagtaaattcatcagtgctgctattatatttggattcaaacaattttgaaggagcacttcctgatctaccactctctatcaaaggcttcggtgtggctagtaatagtttcacaagtgagatacctctttcaatctgcaaccgaagctctctcgctgctattgatctatcctacaacaacttcactggtcccattcctccatgtttgcgtaatttggaacttgtgtatctccggaacaacaacctggaaggaagtatccctgacgcgctctgtgatggtgcctctttacggacactcgatgttagccataaccgattaacagggaagcttccaaggtcttttgtaaactgctcatcgctaaagtttctaagcgttataaacaacagaattgaagatacgtttccgttctggctcaaagctttaccgaatttgcaagtccttactcttcgctcaaacagattttatggtcctatatctcctccgcatcaaggtcctctcgggtttccagagctgcggatatttgaaatatctgacaataagtttacaggaagcttgccaccaaactactttgtgaactggaaagcatcatcacgcacgatgaatcaagatgggggtttatatatggtatacgaggagaagctgttcgacgaaggcggctatggttatacagatgctttagatttgcaatacaaaggtctacacatggagcaagctaaggccctcacttcctacgccgccattgatttttctggaaatagactcgaaggacagattcctgaatctattggactcttgaaggcactgattgcagtcaatatatcaaacaacgccttcacaggccatattcccctgtctatggccaatcttgagaatctcgagtcactagacatgtcaagaaaccaactctcggggactattcctaatggactagggagcatttcgtttttggcgtacatcaacgtgtctcacaaccaactcacgggtgaaataccacaaggaacacagattactgggcaatctaaatcttccttcgaagggaatgcagggctttgtggtctacctctcaaggaaagttgcttcggcactggtgcacctccgatgtatcaccaaaagcaagaggacaaagaagaagaagaagaagaagaagaagaagaagaagaagtgttgaacgggagggttgtcagtggtatttgtataggtatagcttcgcttttgttaatcataattgtggcttctctgtgttggttcatgaagaggaaaaagaaaaacaatgccagtgatggtaacccatctgattctactactttggggatgttccatgagaaggtaagttatgaagagcttcatagtgcaacaagtcgcttctcttcaaccaatttgattggttcaggcaatttcggtaatgtgtttaaaggattgcttggccctgagaataaactcgtcgcggttaaagttttgaacctcctaaagcatggagcgacgaaaagctttatggcggaatgtgaaaccttcaagggtatacgacatcgtaaccttgtaaaactgataacggtttgttcaagccttgattccgagggaaatgatttcagagctctggtctatgagttcatgccaaaaggaagtctggatatgtggctgcagctagaagatctggaaagggtaaacgatcactcgagatctttaacacccgcagagaaactcaacatagcaatagatgtggcttcagctttggagtatctgcacgttcattgtcatgaccctgtagctcactgtgatattaagccaagcaacattcttctagacgatgatctgactgctcatgttagtgactttggtttggctcagctcctctataaatacgatcgagaatcctttctaaaccagtttagttctgctggtgtcagaggcaccattggctatgccgcgccaggttaataaacatctatatgcaaaaagtattgtttaacaaaagagttatccaacctcattgtgtgttgtttctttgaaatatgtgcagagtatggaatgggaggccaaccatcaatacaaggagatgtgtacagcttcggaattctacttttggagatgtttagtggaaagaaaccaacagatgaatcatttgcaggcgattataacctccacagctacacaaagtctatattatcgggttgcacgagcagtggaggcagcaacgccattgatgaggggttgagactggttttgcaggtggggataaagtgttctgaagaatatccgagggataggatgagaacggatgaagcagtacgagaattaatctcaataagatctaagttcttcagttccaagacgactattacagagagtcctcgagatgctccgcaaagttctcctcaggaatggatgttaaatacggacatgcatactatg

SEQ ID NO: 16 - protein, 1232 aa, Artificial Sequence
  Fusion protein
MSKALLHLHFLSLFLLCCVCHSSIFTLNFHFTGIVACRPHQIQAFTKFTNEFDTRGCNNSDTFNGVWCDNSTGAVAVLQLRKCLSGTLKSNSSLFGFHQLRYVDLQNNNLTSSSLPSGFGNLKRLEGLFLSSNGFLGQVPSSFSNLTMLAQLDLSYNKLTGSFPLVRGLRKLIVLDLSYNHFSGTLNPNSSLFELHQLRYLNLAFNNFSSSLPSKFGNLHRLENLILSSNGFSGQVPSTISNLTRLTKLYLDQNKLTSSFPLVQNLTNLYELDLSYNKFFGVIPSSLLTLPFLAHLALRENNLAGSVEVSNSSTSSRLEIMYLGSNHFEGQILEPISKLINLKHLDLSFLNTSYPIDLKLFSSLKSLRSLDLSGNSISSASLSSDSYIPLTLEMLTLRHCDINEFPNILKTLKELVYIDISNNRMKGKIPEWLWSLPLLQSVTLGNNYFTGFQGSAEILVNSSVLLLYLDSNNFEGALPDLPLSIKGFGVASNSFTSEIPLSICNRSSLAAIDLSYNNFTGPIPPCLRNLELVYLRNNNLEGSIPDALCDGASLRTLDVSHNRLTGKLPRSFVNCSSLKFLSVINNRIEDTFPFWLKALPNLQVLTLRSNRFYGPISPPHQGPLGFPELRIFEISDNKFTGSLPPNYFVNWKASSRTMNQDGGLYMVYEEKLFDEGGYGYTDALDLQYKGLHMEQAKALTSYAAIDFSGNRLEGQIPESIGLLKALIAVNISNNAFTGHIPLSMANLENLESLDMSRNQLSGTIPNGLGSISFLAYINVSHNQLTGEIPQGTQITGQSKSSFEGNAGLCGLPLKESCFGTGAPPMYHQKQEDKEEEEEEEEEEEEVLNGRVVSGICIGIASLLLIIIVASLCWFMKRKKKNNASDGNPSDSTTLGMFHEKVSYEELHSATSRFSSTNLIGSGNFGNVFKGLLGPENKLVAVKVLNLLKHGATKSFMAECETFKGIRHRNLVKLITVCSSLDSEGNDFRALVYEFMPKGSLDMWLQLEDLERVNDHSRSLTPAEKLNIAIDVASALEYLHVHCHDPVAHCDIKPSNILLDDDLTAHVSDFGLAQLLYKYDRESFLNQFSSAGVRGTIGYAAPEYGMGGQPSIQGDVYSFGILLLEMFSGKKPTDESFAGDYNLHSYTKSILSGCTSSGGSNAIDEGLRLVLQVGIKCSEEYPRDRMRTDEAVRELISIRSKFFSSKTTITESPRDAPQSSPQEWMLNTDMHTM

SEQ ID NO: 17 - DNA, 3870 bp, Artificial Sequence
  Encodes fusion protein
atgtcaaaggcgcttttgcatttgcattttctttctctgtttttactctgttgtgtctgccattcaagtatttttactttaaattttcattttactggtattgtggcctgtcgtccccaccagattcaagccttcacgaagttcacgaacgagtttgacacccgcggttgcaacaacagtgacacctttaatggagtctggtgcgataactcgacgggtgcggtcgcagtgctacaactaaggaagtgtctcagtggaactttgaagtccaacagtagcctcttcgggtttcatcaactccgttacgttgatctccaaaacaacaacttaacctcctcttcactcccttccgggtttggaaatctcaaaagattagagggcttgtttctttcctctaatggcttcctcggccaagttccttcctcattcagtaacctaacaatgcttgctcaattagacctttcttataacaagctcactggtagtttcccacttgtccggggtctaagaaagctcattgttttagacctttcatataatcacttctccggaactctgaatccaaacagtagcctctttgagttgcaccagctacgttaccttaatctcgcttttaacaactttagttcctcactcccttccaaatttggcaatctccatagattagagaacttgattctttcctctaatggcttttctggtcaagttccttccacaattagtaacctgacccggttaactaagttgtaccttgaccaaaacaagctcactagtagtttcccacttgtacagaatctaaccaacctctacgaattagacctttcatataataagttctttggagtcatcccttcttctctcctcactctgcctttcttagcacatcttgctctacgtgaaaacaatcttgctggttctgttgaagtttcaaactcctctacctcatctaggctcgaaatcatgtatctcgggtctaaccattttgaaggacaaatcctagagcctatctcaaagctcatcaacctcaagcatcttgacctttctttcctaaacacaagctacccaatagacttaaaactcttctcctccctcaaatctttgcggtcactggatctttctggaaacagtatatcttcggccagtttaagttcagattcatacatcccgttgaccctggaaatgttgaccttgaggcactgtgacatcaacgagttccccaacatcttaaagaccctcaaggagttggtgtatatagacatatccaacaacagaatgaaagggaagatccctgagtggttatggagcctacctcttctacagtcagtaactcttggaaataattatttcacaggtttccaaggttcggcggagattttagtaaattcatcagtgctgctattatatttggattcaaacaattttgaaggagcacttcctgatctaccactctctatcaaaggcttcggtgtggctagtaatagtttcacaagtgagatacctctttcaatctgcaaccgaagctctctcgctgctattgatctatcctacaacaacttcactggtcccattcctccatgtttgcgtaatttggaacttgtgtatctccggaacaacaacctggaaggaagtatccctgacgcgctctgtgatggtgcctctttacggacactcgatgttagccataaccgattaacagggaagcttccaaggtcttttgtaaactgctcatcgctaaagtttctaagcgttataaacaacagaattgaagatacgtttccgttctggctcaaagctttaccgaatttgcaagtccttactcttcgctcaaacagattttatggtcctatatctcctccgcatcaaggtcctctcgggtttccagagctgcggatatttgaaatatctgacaataagtttacaggaagcttgccaccaaactactttgtgaactggaaagcatcatcacgcacgatgaatcaagatgggggtttatatatggtatacgaggagaagctgttcgacgaaggcggctatggttatacagatgctttagatttgcaatacaaaggtctacacatggagcaagctaaggccctcacttcctacgccgccattgatttttctggaaatagactcgaaggacagattcctgaatctattggactcttgaaggcactgattgcagtcaatatatcaaacaacgccttcacaggccatattcccctgtctatggccaatcttgagaatctcgagtcactagacatgtcaagaaaccaactctcggggactattcctaatggactagggagcatttcgtttttggcgtacatcaacgtgtctcacaaccaactcacgggtgaaataccacaaggaacacagattactgggcaatctaaatcttccttcgaagggaatgcagggctttgtggtctacctctcaaggaaagttgcttcggcactggtgcacctccgatgtatcaccaaaagcaagaggacaaagaagaagaagaagaagaagaagaagaagaagaagaagtgttgaacgggagggttgtcagtggtatttgtataggtatagcttcgcttttgttaatcataattgtggcttctctgtgttggttcatgaagaggaaaaagaaaaacaatgccagtgatggtaacccatctgattctactactttggggatgttccatgagaaggtaagttatgaagagcttcatagtgcaacaagtcgcttctcttcaaccaatttgattggttcaggcaatttcggtaatgtgtttaaaggattgcttggccctgagaataaactcgtcgcggttaaagttttgaacctcctaaagcatggagcgacgaaaagctttatggcggaatgtgaaaccttcaagggtatacgacatcgtaaccttgtaaaactgataacggtttgttcaagccttgattccgagggaaatgatttcagagctctggtctatgagttcatgccaaaaggaagtctggatatgtggctgcagctagaagatctggaaagggtaaacgatcactcgagatctttaacacccgcagagaaactcaacatagcaatagatgtggcttcagctttggagtatctgcacgttcattgtcatgaccctgtagctcactgtgatattaagccaagcaacattcttctagacgatgatctgactgctcatgttagtgactttggtttggctcagctcctctataaatacgatcgagaatcctttctaaaccagtttagttctgctggtgtcagaggcaccattggctatgccgcgccaggttaataaacatctatatgcaaaaagtattgtttaacaaaagagttatccaacctcattgtgtgttgtttctttgaaatatgtgcagagtatggaatgggaggccaaccatcaatacaaggagatgtgtacagcttcggaattctacttttggagatgtttagtggaaagaaaccaacagatgaatcatttgcaggcgattataacctccacagctacacaaagtctatattatcgggttgcacgagcagtggaggcagcaacgccattgatgaggggttgagactggttttgcaggtggggataaagtgttctgaagaatatccgagggataggatgagaacggatgaagcagtacgagaattaatctcaataagatctaagttcttcagttccaagacgactattacagagagtcctcgagatgctccgcaaagttctcctcaggaatggatgttaaatacggacatgcatactatggcttcggattataaggaccatgacggagactataaggaccatgacctcgacgctgcagcagcggattataaggacgatgacgataag

SEQ ID NO: 18 - protein, 1261 aa, Artificial Sequence
  Fusion protein
MSKALLHLHFLSLFLLCCVCHSSIFTLNFHFTGIVACRPHQIQAFTKFTNEFDTRGCNNSDTFNGVWCDNSTGAVAVLQLRKCLSGTLKSNSSLFGFHQLRYVDLQNNNLTSSSLPSGFGNLKRLEGLFLSSNGFLGQVPSSFSNLTMLAQLDLSYNKLTGSFPLVRGLRKLIVLDLSYNHFSGTLNPNSSLFELHQLRYLNLAFNNFSSSLPSKFGNLHRLENLILSSNGFSGQVPSTISNLTRLTKLYLDQNKLTSSFPLVQNLTNLYELDLSYNKFFGVIPSSLLTLPFLAHLALRENNLAGSVEVSNSSTSSRLEIMYLGSNHFEGQILEPISKLINLKHLDLSFLNTSYPIDLKLFSSLKSLRSLDLSGNSISSASLSSDSYIPLTLEMLTLRHCDINEFPNILKTLKELVYIDISNNRMKGKIPEWLWSLPLLQSVTLGNNYFTGFQGSAEILVNSSVLLLYLDSNNFEGALPDLPLSIKGFGVASNSFTSEIPLSICNRSSLAAIDLSYNNFTGPIPPCLRNLELVYLRNNNLEGSIPDALCDGASLRTLDVSHNRLTGKLPRSFVNCSSLKFLSVINNRIEDTFPFWLKALPNLQVLTLRSNRFYGPISPPHQGPLGFPELRIFEISDNKFTGSLPPNYFVNWKASSRTMNQDGGLYMVYEEKLFDEGGYGYTDALDLQYKGLHMEQAKALTSYAAIDFSGNRLEGQIPESIGLLKALIAVNISNNAFTGHIPLSMANLENLESLDMSRNQLSGTIPNGLGSISFLAYINVSHNQLTGEIPQGTQITGQSKSSFEGNAGLCGLPLKESCFGTGAPPMYHQKQEDKEEEEEEEEEEEEVLNGRVVSGICIGIASLLLIIIVASLCWFMKRKKKNNASDGNPSDSTTLGMFHEKVSYEELHSATSRFSSTNLIGSGNFGNVFKGLLGPENKLVAVKVLNLLKHGATKSFMAECETFKGIRHRNLVKLITVCSSLDSEGNDFRALVYEFMPKGSLDMWLQLEDLERVNDHSRSLTPAEKLNIAIDVASALEYLHVHCHDPVAHCDIKPSNILLDDDLTAHVSDFGLAQLLYKYDRESFLNQFSSAGVRGTIGYAAPEYGMGGQPSIQGDVYSFGILLLEMFSGKKPTDESFAGDYNLHSYTKSILSGCTSSGGSNAIDEGLRLVLQVGIKCSEEYPRDRMRTDEAVRELISIRSKFFSSKTTITESPRDAPQSSPQEWMLNTDMHTMASDYKDHDGDYKDHDLDAAAADYKDDDDK

SEQ ID NO: 19 - DNA, 3675 bp, Artificial Sequence
  Encodes fusion protein
atgtcaaaggcgcttttgcatttgcattttctttctctgtttttactctgttgtgtctgccattcaagtatttttactttaaattttcattttactggtattgtggcctgtcgtccccaccagattcaagccttcacgaagttcacgaacgagtttgacacccgcggttgcaacaacagtgacacctttaatggagtctggtgcgataactcgacgggtgcggtcgcagtgctacaactaaggaagtgtctcagtggaactttgaagtccaacagtagcctcttcgggtttcatcaactccgttacgttgatctccaaaacaacaacttaacctcctcttcactcccttccgggtttggaaatctcaaaagattagagggcttgtttctttcctctaatggcttcctcggccaagttccttcctcattcagtaacctaacaatgcttgctcaattagacctttcttataacaagctcactggtagtttcccacttgtccggggtctaagaaagctcattgttttagacctttcatataatcacttctccggaactctgaatccaaacagtagcctctttgagttgcaccagctacgttaccttaatctcgcttttaacaactttagttcctcactcccttccaaatttggcaatctccatagattagagaacttgattctttcctctaatggcttttctggtcaagttccttccacaattagtaacctgacccggttaactaagttgtaccttgaccaaaacaagctcactagtagtttcccacttgtacagaatctaaccaacctctacgaattagacctttcatataataagttctttggagtcatcccttcttctctcctcactctgcctttcttagcacatcttgctctacgtgaaaacaatcttgctggttctgttgaagtttcaaactcctctacctcatctaggctcgaaatcatgtatctcgggtctaaccattttgaaggacaaatcctagagcctatctcaaagctcatcaacctcaagcatcttgacctttctttcctaaacacaagctacccaatagacttaaaactcttctcctccctcaaatctttgcggtcactggatctttctggaaacagtatatcttcggccagtttaagttcagattcatacatcccgttgaccctggaaatgttgaccttgaggcactgtgacatcaacgagttccccaacatcttaaagaccctcaaggagttggtgtatatagacatatccaacaacagaatgaaagggaagatccctgagtggttatggagcctacctcttctacagtcagtaactcttggaaataattatttcacaggtttccaaggttcggcggagattttagtaaattcatcagtgctgctattatatttggattcaaacaattttgaaggagcacttcctgatctaccactctctatcaaaggcttcggtgtggctagtaatagtttcacaagtgagatacctctttcaatctgcaaccgaagctctctcgctgctattgatctatcctacaacaacttcactggtcccattcctccatgtttgcgtaatttggaacttgtgtatctccggaacaacaacctggaaggaagtatccctgacgcgctctgtgatggtgcctctttacggacactcgatgttagccataaccgattaacagggaagcttccaaggtcttttgtaaactgctcatcgctaaagtttctaagcgttataaacaacagaattgaagatacgtttccgttctggctcaaagctttaccgaatttgcaagtccttactcttcgctcaaacagattttatggtcctatatctcctccgcatcaaggtcctctcgggtttccagagctgcggatatttgaaatatctgacaataagtttacaggaagcttgccaccaaactactttgtgaactggaaagcatcatcacgcacgatgaatcaagatgggggtttatatatggtatacgaggagaagctgttcgacgaaggcggctatggttatacagatgctttagatttgcaatacaaaggtctacacatggagcaagctaaggccctcacttcctacgccgccattgatttttctggaaatagactcgaaggacagattcctgaatctattggactcttgaaggcactgattgcagtcaatatatcaaacaacgccttcacaggccatattcccctgtctatggccaatcttgagaatctcgagtcactagacatgtcaagaaaccaactctcggggactattcctaatggactagggagcatttcgtttttggcgtacatcaacgtgtctcacaaccaactcacgggtgaaataccacaaggaacacagattactgggcaatctaaatcttccttcgaagggaatgcagggctttgtggtctacctctcaaggaaagttgcttcggcactggtgcacctccgatgtatcaccaaaagcaagaggacaaagaagaagaagaagaagaagaagaagaagaagaagaagtgttgaacgggaggttcccagttctacctatttctgtttctctggccgcagcactggccatcctctcatcactctacttgcttataacctggcacaagagaactaaaaagggagccccttcaagaacttccatgaaaggccacccattggtgtcttattcgcagttggtaaaagcaacagatggtttcgcgccgaccaatttgttgggttctggatcatttggctcagtatacaaaggaaagcttaatatccaagatcatgttgcagtgaaggtactaaagcttgaaaatcctaaggcgctcaagagtttcactgccgaatgtgaagcactacgaaatatgcgacatcgaaatcttgtcaagatagttacaatttgctcgagcattgataacagagggaacgatttcaaagcaattgtgtatgacttcatgcccaacggcagtctggaagattggatacaccctgaaacaaatgatcaagcagaccagaggcacttgaatctgcatcgaagagtgaccatactacttgatgttgcctgcgcactggactatcttcaccgccatggccctgaacctgttgtacactgtgatattaaatcaagcaatgtgctgttagattctgatatggtagcccatgttggagattttgggcttgcaagaatacttgttgatgggacctcattgatacaacagtcaacaagctcgatgggatttatagggacaattggctatgcagcaccagagtatggcgttgggctcattgcatcaacgcatggagatatttacagctatggaattctagtgctggaaatagtaaccgggaagcggccaactgacagtacattcagacccgatttgggcctccgtcagtacgttgaactgggcctacatggcagagtgacggatgttgttgacacgaagctcattttggattctgagaactggctgaacagtacaaataattctccatgtagaagaatcactgaatgcattgtttggctgcttagacttgggttgtcttgctctcaggaattgccatcgagtagaacgccaaccggagatatcatcgacgaactgaatgccatcaaacagaatctctccggattgtttccagtgtgtgaaggtgggagccttgaattt

SEQ ID NO: 20 - protein, 1225 aa, Artificial Sequence
  Fusion protein
MSKALLHLHFLSLFLLCCVCHSSIFTLNFHFTGIVACRPHQIQAFTKFTNEFDTRGCNNSDTFNGVWCDNSTGAVAVLQLRKCLSGTLKSNSSLFGFHQLRYVDLQNNNLTSSSLPSGFGNLKRLEGLFLSSNGFLGQVPSSFSNLTMLAQLDLSYNKLTGSFPLVRGLRKLIVLDLSYNHFSGTLNPNSSLFELHQLRYLNLAFNNFSSSLPSKFGNLHRLENLILSSNGFSGQVPSTISNLTRLTKLYLDQNKLTSSFPLVQNLTNLYELDLSYNKFFGVIPSSLLTLPFLAHLALRENNLAGSVEVSNSSTSSRLEIMYLGSNHFEGQILEPISKLINLKHLDLSFLNTSYPIDLKLFSSLKSLRSLDLSGNSISSASLSSDSYIPLTLEMLTLRHCDINEFPNILKTLKELVYIDISNNRMKGKIPEWLWSLPLLQSVTLGNNYFTGFQGSAEILVNSSVLLLYLDSNNFEGALPDLPLSIKGFGVASNSFTSEIPLSICNRSSLAAIDLSYNNFTGPIPPCLRNLELVYLRNNNLEGSIPDALCDGASLRTLDVSHNRLTGKLPRSFVNCSSLKFLSVINNRIEDTFPFWLKALPNLQVLTLRSNRFYGPISPPHQGPLGFPELRIFEISDNKFTGSLPPNYFVNWKASSRTMNQDGGLYMVYEEKLFDEGGYGYTDALDLQYKGLHMEQAKALTSYAAIDFSGNRLEGQIPESIGLLKALIAVNISNNAFTGHIPLSMANLENLESLDMSRNQLSGTIPNGLGSISFLAYINVSHNQLTGEIPQGTQITGQSKSSFEGNAGLCGLPLKESCFGTGAPPMYHQKQEDKEEEEEEEEEEEEVLNGRFPVLPISVSLAAALAILSSLYLLITWHKRTKKGAPSRTSMKGHPLVSYSQLVKATDGFAPTNLLGSGSFGSVYKGKLNIQDHVAVKVLKLENPKALKSFTAECEALRNMRHRNLVKIVTICSSIDNRGNDFKAIVYDFMPNGSLEDWIHPETNDQADQRHLNLHRRVTILLDVACALDYLHRHGPEPVVHCDIKSSNVLLDSDMVAHVGDFGLARILVDGTSLIQQSTSSMGFIGTIGYAAPEYGVGLIASTHGDIYSYGILVLEIVTGKRPTDSTFRPDLGLRQYVELGLHGRVTDVVDTKLILDSENWLNSTNNSPCRRITECIVWLLRLGLSCSQELPSSRTPTGDIIDELNAIKQNLSGLFPVCEGGSLEF

SEQ ID NO: 21 - DNA, 3759 bp, Artificial Sequence
  Encodes fusion protein
atgtcaaaggcgcttttgcatttgcattttctttctctgtttttactctgttgtgtctgccattcaagtatttttactttaaattttcattttactggtattgtggcctgtcgtccccaccagattcaagccttcacgaagttcacgaacgagtttgacacccgcggttgcaacaacagtgacacctttaatggagtctggtgcgataactcgacgggtgcggtcgcagtgctacaactaaggaagtgtctcagtggaactttgaagtccaacagtagcctcttcgggtttcatcaactccgttacgttgatctccaaaacaacaacttaacctcctcttcactcccttccgggtttggaaatctcaaaagattagagggcttgtttctttcctctaatggcttcctcggccaagttccttcctcattcagtaacctaacaatgcttgctcaattagacctttcttataacaagctcactggtagtttcccacttgtccggggtctaagaaagctcattgttttagacctttcatataatcacttctccggaactctgaatccaaacagtagcctctttgagttgcaccagctacgttaccttaatctcgcttttaacaactttagttcctcactcccttccaaatttggcaatctccatagattagagaacttgattctttcctctaatggcttttctggtcaagttccttccacaattagtaacctgacccggttaactaagttgtaccttgaccaaaacaagctcactagtagtttcccacttgtacagaatctaaccaacctctacgaattagacctttcatataataagttctttggagtcatcccttcttctctcctcactctgcctttcttagcacatcttgctctacgtgaaaacaatcttgctggttctgttgaagtttcaaactcctctacctcatctaggctcgaaatcatgtatctcgggtctaaccattttgaaggacaaatcctagagcctatctcaaagctcatcaacctcaagcatcttgacctttctttcctaaacacaagctacccaatagacttaaaactcttctcctccctcaaatctttgcggtcactggatctttctggaaacagtatatcttcggccagtttaagttcagattcatacatcccgttgaccctggaaatgttgaccttgaggcactgtgacatcaacgagttccccaacatcttaaagaccctcaaggagttggtgtatatagacatatccaacaacagaatgaaagggaagatccctgagtggttatggagcctacctcttctacagtcagtaactcttggaaataattatttcacaggtttccaaggttcggcggagattttagtaaattcatcagtgctgctattatatttggattcaaacaattttgaaggagcacttcctgatctaccactctctatcaaaggcttcggtgtggctagtaatagtttcacaagtgagatacctctttcaatctgcaaccgaagctctctcgctgctattgatctatcctacaacaacttcactggtcccattcctccatgtttgcgtaatttggaacttgtgtatctccggaacaacaacctggaaggaagtatccctgacgcgctctgtgatggtgcctctttacggacactcgatgttagccataaccgattaacagggaagcttccaaggtcttttgtaaactgctcatcgctaaagtttctaagcgttataaacaacagaattgaagatacgtttccgttctggctcaaagctttaccgaatttgcaagtccttactcttcgctcaaacagattttatggtcctatatctcctccgcatcaaggtcctctcgggtttccagagctgcggatatttgaaatatctgacaataagtttacaggaagcttgccaccaaactactttgtgaactggaaagcatcatcacgcacgatgaatcaagatgggggtttatatatggtatacgaggagaagctgttcgacgaaggcggctatggttatacagatgctttagatttgcaatacaaaggtctacacatggagcaagctaaggccctcacttcctacgccgccattgatttttctggaaatagactcgaaggacagattcctgaatctattggactcttgaaggcactgattgcagtcaatatatcaaacaacgccttcacaggccatattcccctgtctatggccaatcttgagaatctcgagtcactagacatgtcaagaaaccaactctcggggactattcctaatggactagggagcatttcgtttttggcgtacatcaacgtgtctcacaaccaactcacgggtgaaataccacaaggaacacagattactgggcaatctaaatcttccttcgaagggaatgcagggctttgtggtctacctctcaaggaaagttgcttcggcactggtgcacctccgatgtatcaccaaaagcaagaggacaaagaagaagaagaagaagaagaagaagaagaagaagaagtgttgaacgggaggttcccagttctacctatttctgtttctctggccgcagcactggccatcctctcatcactctacttgcttataacctggcacaagagaactaaaaagggagccccttcaagaacttccatgaaaggccacccattggtgtcttattcgcagttggtaaaagcaacagatggtttcgcgccgaccaatttgttgggttctggatcatttggctcagtatacaaaggaaagcttaatatccaagatcatgttgcagtgaaggtactaaagcttgaaaatcctaaggcgctcaagagtttcactgccgaatgtgaagcactacgaaatatgcgacatcgaaatcttgtcaagatagttacaatttgctcgagcattgataacagagggaacgatttcaaagcaattgtgtatgacttcatgcccaacggcagtctggaagattggatacaccctgaaacaaatgatcaagcagaccagaggcacttgaatctgcatcgaagagtgaccatactacttgatgttgcctgcgcactggactatcttcaccgccatggccctgaacctgttgtacactgtgatattaaatcaagcaatgtgctgttagattctgatatggtagcccatgttggagattttgggcttgcaagaatacttgttgatgggacctcattgatacaacagtcaacaagctcgatgggatttatagggacaattggctatgcagcaccagagtatggcgttgggctcattgcatcaacgcatggagatatttacagctatggaattctagtgctggaaatagtaaccgggaagcggccaactgacagtacattcagacccgatttgggcctccgtcagtacgttgaactgggcctacatggcagagtgacggatgttgttgacacgaagctcattttggattctgagaactggctgaacagtacaaataattctccatgtagaagaatcactgaatgcattgtttggctgcttagacttgggttgtcttgctctcaggaattgccatcgagtagaacgccaaccggagatatcatcgacgaactgaatgccatcaaacagaatctctccggattgtttccagtgtgtgaaggtgggagccttgaattttcggattataaggaccatgacggagactataaggaccatgacctcgacgctgcagcagcggattataaggacgatgacgataag

SEQ ID NO: 22 - protein, 1253 aa, Artificial Sequence
  Fusion protein
MSKALLHLHFLSLFLLCCVCHSSIFTLNFHFTGIVACRPHQIQAFTKFTNEFDTRGCNNSDTFNGVWCDNSTGAVAVLQLRKCLSGTLKSNSSLFGFHQLRYVDLQNNNLTSSSLPSGFGNLKRLEGLFLSSNGFLGQVPSSFSNLTMLAQLDLSYNKLTGSFPLVRGLRKLIVLDLSYNHFSGTLNPNSSLFELHQLRYLNLAFNNFSSSLPSKFGNLHRLENLILSSNGFSGQVPSTISNLTRLTKLYLDQNKLTSSFPLVQNLTNLYELDLSYNKFFGVIPSSLLTLPFLAHLALRENNLAGSVEVSNSSTSSRLEIMYLGSNHFEGQILEPISKLINLKHLDLSFLNTSYPIDLKLFSSLKSLRSLDLSGNSISSASLSSDSYIPLTLEMLTLRHCDINEFPNILKTLKELVYIDISNNRMKGKIPEWLWSLPLLQSVTLGNNYFTGFQGSAEILVNSSVLLLYLDSNNFEGALPDLPLSIKGFGVASNSFTSEIPLSICNRSSLAAIDLSYNNFTGPIPPCLRNLELVYLRNNNLEGSIPDALCDGASLRTLDVSHNRLTGKLPRSFVNCSSLKFLSVINNRIEDTFPFWLKALPNLQVLTLRSNRFYGPISPPHQGPLGFPELRIFEISDNKFTGSLPPNYFVNWKASSRTMNQDGGLYMVYEEKLFDEGGYGYTDALDLQYKGLHMEQAKALTSYAAIDFSGNRLEGQIPESIGLLKALIAVNISNNAFTGHIPLSMANLENLESLDMSRNQLSGTIPNGLGSISFLAYINVSHNQLTGEIPQGTQITGQSKSSFEGNAGLCGLPLKESCFGTGAPPMYHQKQEDKEEEEEEEEEEEEVLNGRFPVLPISVSLAAALAILSSLYLLITWHKRTKKGAPSRTSMKGHPLVSYSQLVKATDGFAPTNLLGSGSFGSVYKGKLNIQDHVAVKVLKLENPKALKSFTAECEALRNMRHRNLVKIVTICSSIDNRGNDFKAIVYDFMPNGSLEDWIHPETNDQADQRHLNLHRRVTILLDVACALDYLHRHGPEPVVHCDIKSSNVLLDSDMVAHVGDFGLARILVDGTSLIQQSTSSMGFIGTIGYAAPEYGVGLIASTHGDIYSYGILVLEIVTGKRPTDSTFRPDLGLRQYVELGLHGRVTDVVDTKLILDSENWLNSTNNSPCRRITECIVWLLRLGLSCSQELPSSRTPTGDIIDELNAIKQNLSGLFPVCEGGSLEFSDYKDHDGDYKDHDLDAAAADYKDDDDK

SEQ ID NO: 23 - DNA, 3984 bp, Artificial Sequence
  Encodes fusion protein
atgtcaaaggcgcttttgcatttgcattttctttctctgtttttactctgttgtgtctgccattcaagtatttttactttaaattttcattttactggtattgtggcctgtcgtccccaccagattcaagccttcacgaagttcacgaacgagtttgacacccgcggttgcaacaacagtgacacctttaatggagtctggtgcgataactcgacgggtgcggtcgcagtgctacaactaaggaagtgtctcagtggaactttgaagtccaacagtagcctcttcgggtttcatcaactccgttacgttgatctccaaaacaacaacttaacctcctcttcactcccttccgggtttggaaatctcaaaagattagagggcttgtttctttcctctaatggcttcctcggccaagttccttcctcattcagtaacctaacaatgcttgctcaattagacctttcttataacaagctcactggtagtttcccacttgtccggggtctaagaaagctcattgttttagacctttcatataatcacttctccggaactctgaatccaaacagtagcctctttgagttgcaccagctacgttaccttaatctcgcttttaacaactttagttcctcactcccttccaaatttggcaatctccatagattagagaacttgattctttcctctaatggcttttctggtcaagttccttccacaattagtaacctgacccggttaactaagttgtaccttgaccaaaacaagctcactagtagtttcccacttgtacagaatctaaccaacctctacgaattagacctttcatataataagttctttggagtcatcccttcttctctcctcactctgcctttcttagcacatcttgctctacgtgaaaacaatcttgctggttctgttgaagtttcaaactcctctacctcatctaggctcgaaatcatgtatctcgggtctaaccattttgaaggacaaatcctagagcctatctcaaagctcatcaacctcaagcatcttgacctttctttcctaaacacaagctacccaatagacttaaaactcttctcctccctcaaatctttgcggtcactggatctttctggaaacagtatatcttcggccagtttaagttcagattcatacatcccgttgaccctggaaatgttgaccttgaggcactgtgacatcaacgagttccccaacatcttaaagaccctcaaggagttggtgtatatagacatatccaacaacagaatgaaagggaagatccctgagtggttatggagcctacctcttctacagtcagtaactcttggaaataattatttcacaggtttccaaggttcggcggagattttagtaaattcatcagtgctgctattatatttggattcaaacaattttgaaggagcacttcctgatctaccactctctatcaaaggcttcggtgtggctagtaatagtttcacaagtgagatacctctttcaatctgcaaccgaagctctctcgctgctattgatctatcctacaacaacttcactggtcccattcctccatgtttgcgtaatttggaacttgtgtatctccggaacaacaacctggaaggaagtatccctgacgcgctctgtgatggtgcctctttacggacactcgatgttagccataaccgattaacagggaagcttccaaggtcttttgtaaactgctcatcgctaaagtttctaagcgttataaacaacagaattgaagatacgtttccgttctggctcaaagctttaccgaatttgcaagtccttactcttcgctcaaacagattttatggtcctatatctcctccgcatcaaggtcctctcgggtttccagagctgcggatatttgaaatatctgacaataagtttacaggaagcttgccaccaaactactttgtgaactggaaagcatcatcacgcacgatgaatcaagatgggggtttatatatggtatacgaggagaagctgttcgacgaaggcggctatggttatacagatgctttagatttgcaatacaaaggtctacacatggagcaagctaaggccctcacttcctacgccgccattgatttttctggaaatagactcgaaggacagattcctgaatctattggactcttgaaggcactgattgcagtcaatatatcaaacaacgccttcacaggccatattcccctgtctatggccaatcttgagaatctcgagtcactagacatgtcaagaaaccaactctcggggactattcctaatggactagggagcatttcgtttttggcgtacatcaacgtgtctcacaaccaactcacgggtgaaataccacaaggaacacagattactgggcaatctaaatcttccttcgaagggaatgcagggctttgtggtctacctctcaaggaaagttgcttcggcactggtgcacctccgatgtatcaccaaaagcaagaggacaaagaagaagaagaagaagaagaagaagaagaagaagaagtgttgaacgggagaatcactggagcgattgcgggaggagttgctgcaggtgctgcacttctatttgctgttccggccattgcactagcttggtggcgaaggaaaaagccgcaggaccacttctttgatgtaccaggttagctaaacttgctttacctgtttcctcattaacacttctcttgctgatttttttttattaccgtctttttgcagctgaagaggacccagaagttcatttaggacaactgaagaggttttcattgcgtgaactacaagttgcttcggataattttagcaacaagaacatattgggtagaggtggttttggtaaagtttataaaggacggttagctgatggtactttagtggccgttaaaaggctaaaagaggagcgcacccaaggtggcgaactgcagttccagacagaggttgagatgattagtatggcggttcacagaaacttgcttcggcttcgtggattttgcatgactccaaccgaaagattgcttgtttatccctacatggctaatggaagtgttgcctcctgtttaagaggtatctctcatcttgtgcctttttctttgactgcaatatttccgtccaatggttgcctttttatccgtagtaatcttatattttattttctccttagaacgtcccgagtcccagccaccacttgattggccaaagagacagcgtattgcgttgggatctgcaagagggcttgcgtatttacatgatcattgcgacccaaagattattcatcgagatgtgaaagctgcaaatattttgttggatgaagagtttgaagccgtggttggggattttggacttgcaaaactcatggactacaaagacacacatgtgacaaccgcagtgcgtgggacaattggtcatatagcccctgagtacctttccactggaaaatcatcagagaaaaccgatgtctttgggtatggagtcatgcttcttgagcttatcactggacaaagggcttttgatcttgctcgcctcgcgaatgatgatgatgtcatgttactagactgggtatatacatatatgagtttcccacttgtatagttcattatctgtgttacctctatttgtgttaattattcatttcgacaggtgaaagggttgttaaaagagaagaaattggaagcactagtagatgttgatcttcagggtaattacaaagacgaagaagtggagcagctaatccaagtggctttactctgcactcagagttcaccaatggaaagacccaaaatgtctgaagttgtaagaatgcttgaaggagatggtttagctgagagatgggaagagtggcaaaaggaggaaatgttcagacaagatttcaactacccaacccaccatccagccgtgtctggctggatcattggcgattccacttcccagatcgaaaacgaatacccctcgggtccacgt

SEQ ID NO: 24 - protein, 1243 aa, Artificial Sequence
  Fusion protein
MSKALLHLHFLSLFLLCCVCHSSIFTLNFHFTGIVACRPHQIQAFTKFTNEFDTRGCNNSDTFNGVWCDNSTGAVAVLQLRKCLSGTLKSNSSLFGFHQLRYVDLQNNNLTSSSLPSGFGNLKRLEGLFLSSNGFLGQVPSSFSNLTMLAQLDLSYNKLTGSFPLVRGLRKLIVLDLSYNHFSGTLNPNSSLFELHQLRYLNLAFNNFSSSLPSKFGNLHRLENLILSSNGFSGQVPSTISNLTRLTKLYLDQNKLTSSFPLVQNLTNLYELDLSYNKFFGVIPSSLLTLPFLAHLALRENNLAGSVEVSNSSTSSRLEIMYLGSNHFEGQILEPISKLINLKHLDLSFLNTSYPIDLKLFSSLKSLRSLDLSGNSISSASLSSDSYIPLTLEMLTLRHCDINEFPNILKTLKELVYIDISNNRMKGKIPEWLWSLPLLQSVTLGNNYFTGFQGSAEILVNSSVLLLYLDSNNFEGALPDLPLSIKGFGVASNSFTSEIPLSICNRSSLAAIDLSYNNFTGPIPPCLRNLELVYLRNNNLEGSIPDALCDGASLRTLDVSHNRLTGKLPRSFVNCSSLKFLSVINNRIEDTFPFWLKALPNLQVLTLRSNRFYGPISPPHQGPLGFPELRIFEISDNKFTGSLPPNYFVNWKASSRTMNQDGGLYMVYEEKLFDEGGYGYTDALDLQYKGLHMEQAKALTSYAAIDFSGNRLEGQIPESIGLLKALIAVNISNNAFTGHIPLSMANLENLESLDMSRNQLSGTIPNGLGSISFLAYINVSHNQLTGEIPQGTQITGQSKSSFEGNAGLCGLPLKESCFGTGAPPMYHQKQEDKEEEEEEEEEEEEVLNGRITGAIAGGVAAGAALLFAVPAIALAWWRRKKPQDHFFDVPAEEDPEVHLGQLKRFSLRELQVASDNFSNKNILGRGGFGKVYKGRLADGTLVAVKRLKEERTQGGELQFQTEVEMISMAVHRNLLRLRGFCMTPTERLLVYPYMANGSVASCLRERPESQPPLDWPKRQRIALGSARGLAYLHDHCDPKIIHRDVKAANILLDEEFEAVVGDFGLAKLMDYKDTHVTTAVRGTIGHIAPEYLSTGKSSEKTDVFGYGVMLLELITGQRAFDLARLANDDDVMLLDWVKGLLKEKKLEALVDVDLQGNYKDEEVEQLIQVALLCTQSSPMERPKMSEVVRMLEGDGLAERWEEWQKEEMFRQDFNYPTHHPAVSGWIIGDSTSQIENEYPSGPR

SEQ ID NO: 25 - DNA, 4068 bp, Artificial Sequence
  Encodes fusion protein
atgtcaaaggcgcttttgcatttgcattttctttctctgtttttactctgttgtgtctgccattcaagtatttttactttaaattttcattttactggtattgtggcctgtcgtccccaccagattcaagccttcacgaagttcacgaacgagtttgacacccgcggttgcaacaacagtgacacctttaatggagtctggtgcgataactcgacgggtgcggtcgcagtgctacaactaaggaagtgtctcagtggaactttgaagtccaacagtagcctcttcgggtttcatcaactccgttacgttgatctccaaaacaacaacttaacctcctcttcactcccttccgggtttggaaatctcaaaagattagagggcttgtttctttcctctaatggcttcctcggccaagttccttcctcattcagtaacctaacaatgcttgctcaattagacctttcttataacaagctcactggtagtttcccacttgtccggggtctaagaaagctcattgttttagacctttcatataatcacttctccggaactctgaatccaaacagtagcctctttgagttgcaccagctacgttaccttaatctcgcttttaacaactttagttcctcactcccttccaaatttggcaatctccatagattagagaacttgattctttcctctaatggcttttctggtcaagttccttccacaattagtaacctgacccggttaactaagttgtaccttgaccaaaacaagctcactagtagtttcccacttgtacagaatctaaccaacctctacgaattagacctttcatataataagttctttggagtcatcccttcttctctcctcactctgcctttcttagcacatcttgctctacgtgaaaacaatcttgctggttctgttgaagtttcaaactcctctacctcatctaggctcgaaatcatgtatctcgggtctaaccattttgaaggacaaatcctagagcctatctcaaagctcatcaacctcaagcatcttgacctttctttcctaaacacaagctacccaatagacttaaaactcttctcctccctcaaatctttgcggtcactggatctttctggaaacagtatatcttcggccagtttaagttcagattcatacatcccgttgaccctggaaatgttgaccttgaggcactgtgacatcaacgagttccccaacatcttaaagaccctcaaggagttggtgtatatagacatatccaacaacagaatgaaagggaagatccctgagtggttatggagcctacctcttctacagtcagtaactcttggaaataattatttcacaggtttccaaggttcggcggagattttagtaaattcatcagtgctgctattatatttggattcaaacaattttgaaggagcacttcctgatctaccactctctatcaaaggcttcggtgtggctagtaatagtttcacaagtgagatacctctttcaatctgcaaccgaagctctctcgctgctattgatctatcctacaacaacttcactggtcccattcctccatgtttgcgtaatttggaacttgtgtatctccggaacaacaacctggaaggaagtatccctgacgcgctctgtgatggtgcctctttacggacactcgatgttagccataaccgattaacagggaagcttccaaggtcttttgtaaactgctcatcgctaaagtttctaagcgttataaacaacagaattgaagatacgtttccgttctggctcaaagctttaccgaatttgcaagtccttactcttcgctcaaacagattttatggtcctatatctcctccgcatcaaggtcctctcgggtttccagagctgcggatatttgaaatatctgacaataagtttacaggaagcttgccaccaaactactttgtgaactggaaagcatcatcacgcacgatgaatcaagatgggggtttatatatggtatacgaggagaagctgttcgacgaaggcggctatggttatacagatgctttagatttgcaatacaaaggtctacacatggagcaagctaaggccctcacttcctacgccgccattgatttttctggaaatagactcgaaggacagattcctgaatctattggactcttgaaggcactgattgcagtcaatatatcaaacaacgccttcacaggccatattcccctgtctatggccaatcttgagaatctcgagtcactagacatgtcaagaaaccaactctcggggactattcctaatggactagggagcatttcgtttttggcgtacatcaacgtgtctcacaaccaactcacgggtgaaataccacaaggaacacagattactgggcaatctaaatcttccttcgaagggaatgcagggctttgtggtctacctctcaaggaaagttgcttcggcactggtgcacctccgatgtatcaccaaaagcaagaggacaaagaagaagaagaagaagaagaagaagaagaagaagaagtgttgaacgggagaatcactggagcgattgcgggaggagttgctgcaggtgctgcacttctatttgctgttccggccattgcactagcttggtggcgaaggaaaaagccgcaggaccacttctttgatgtaccaggttagctaaacttgctttacctgtttcctcattaacacttctcttgctgatttttttttattaccgtctttttgcagctgaagaggacccagaagttcatttaggacaactgaagaggttttcattgcgtgaactacaagttgcttcggataattttagcaacaagaacatattgggtagaggtggttttggtaaagtttataaaggacggttagctgatggtactttagtggccgttaaaaggctaaaagaggagcgcacccaaggtggcgaactgcagttccagacagaggttgagatgattagtatggcggttcacagaaacttgcttcggcttcgtggattttgcatgactccaaccgaaagattgcttgtttatccctacatggctaatggaagtgttgcctcctgtttaagaggtatctctcatcttgtgcctttttctttgactgcaatatttccgtccaatggttgcctttttatccgtagtaatcttatattttattttctccttagaacgtcccgagtcccagccaccacttgattggccaaagagacagcgtattgcgttgggatctgcaagagggcttgcgtatttacatgatcattgcgacccaaagattattcatcgagatgtgaaagctgcaaatattttgttggatgaagagtttgaagccgtggttggggattttggacttgcaaaactcatggactacaaagacacacatgtgacaaccgcagtgcgtgggacaattggtcatatagcccctgagtacctttccactggaaaatcatcagagaaaaccgatgtctttgggtatggagtcatgcttcttgagcttatcactggacaaagggcttttgatcttgctcgcctcgcgaatgatgatgatgtcatgttactagactgggtatatacatatatgagtttcccacttgtatagttcattatctgtgttacctctatttgtgttaattattcatttcgacaggtgaaagggttgttaaaagagaagaaattggaagcactagtagatgttgatcttcagggtaattacaaagacgaagaagtggagcagctaatccaagtggctttactctgcactcagagttcaccaatggaaagacccaaaatgtctgaagttgtaagaatgcttgaaggagatggtttagctgagagatgggaagagtggcaaaaggaggaaatgttcagacaagatttcaactacccaacccaccatccagccgtgtctggctggatcattggcgattccacttcccagatcgaaaacgaatacccctcgggtccacgttcggattataaggaccatgacggagactataaggaccatgacctcgacgctgcagcagcggattataaggacgatgacgataag

SEQ ID NO: 26 - protein, 1271 aa, Artificial Sequence
  Fusion protein
MSKALLHLHFLSLFLLCCVCHSSIFTLNFHFTGIVACRPHQIQAFTKFTNEFDTRGCNNSDTFNGVWCDNSTGAVAVLQLRKCLSGTLKSNSSLFGFHQLRYVDLQNNNLTSSSLPSGFGNLKRLEGLFLSSNGFLGQVPSSFSNLTMLAQLDLSYNKLTGSFPLVRGLRKLIVLDLSYNHFSGTLNPNSSLFELHQLRYLNLAFNNFSSSLPSKFGNLHRLENLILSSNGFSGQVPSTISNLTRLTKLYLDQNKLTSSFPLVQNLTNLYELDLSYNKFFGVIPSSLLTLPFLAHLALRENNLAGSVEVSNSSTSSRLEIMYLGSNHFEGQILEPISKLINLKHLDLSFLNTSYPIDLKLFSSLKSLRSLDLSGNSISSASLSSDSYIPLTLEMLTLRHCDINEFPNILKTLKELVYIDISNNRMKGKIPEWLWSLPLLQSVTLGNNYFTGFQGSAEILVNSSVLLLYLDSNNFEGALPDLPLSIKGFGVASNSFTSEIPLSICNRSSLAAIDLSYNNFTGPIPPCLRNLELVYLRNNNLEGSIPDALCDGASLRTLDVSHNRLTGKLPRSFVNCSSLKFLSVINNRIEDTFPFWLKALPNLQVLTLRSNRFYGPISPPHQGPLGFPELRIFEISDNKFTGSLPPNYFVNWKASSRTMNQDGGLYMVYEEKLFDEGGYGYTDALDLQYKGLHMEQAKALTSYAAIDFSGNRLEGQIPESIGLLKALIAVNISNNAFTGHIPLSMANLENLESLDMSRNQLSGTIPNGLGSISFLAYINVSHNQLTGEIPQGTQITGQSKSSFEGNAGLCGLPLKESCFGTGAPPMYHQKQEDKEEEEEEEEEEEEVLNGRITGAIAGGVAAGAALLFAVPAIALAWWRRKKPQDHFFDVPAEEDPEVHLGQLKRFSLRELQVASDNFSNKNILGRGGFGKVYKGRLADGTLVAVKRLKEERTQGGELQFQTEVEMISMAVHRNLLRLRGFCMTPTERLLVYPYMANGSVASCLRERPESQPPLDWPKRQRIALGSARGLAYLHDHCDPKIIHRDVKAANILLDEEFEAVVGDFGLAKLMDYKDTHVTTAVRGTIGHIAPEYLSTGKSSEKTDVFGYGVMLLELITGQRAFDLARLANDDDVMLLDWVKGLLKEKKLEALVDVDLQGNYKDEEVEQLIQVALLCTQSSPMERPKMSEVVRMLEGDGLAERWEEWQKEEMFRQDFNYPTHHPAVSGWIIGDSTSQIENEYPSGPRSDYKDHDGDYKDHDLDAAAADYKDDDDK

SEQ ID NO: 27 - DNA, 3624 bp, Artificial Sequence
  Encodes fusion protein
atgtcaaaggcgcttttgcatttgcattttctttctctgtttttactctgttgtgtctgccattcaagtatttttactttaaattttcattttactggtattgtggcctgtcgtccccaccagattcaagccttcacgaagttcacgaacgagtttgacacccgcggttgcaacaacagtgacacctttaatggagtctggtgcgataactcgacgggtgcggtcgcagtgctacaactaaggaagtgtctcagtggaactttgaagtccaacagtagcctcttcgggtttcatcaactccgttacgttgatctccaaaacaacaacttaacctcctcttcactcccttccgggtttggaaatctcaaaagattagagggcttgtttctttcctctaatggcttcctcggccaagttccttcctcattcagtaacctaacaatgcttgctcaattagacctttcttataacaagctcactggtagtttcccacttgtccggggtctaagaaagctcattgttttagacctttcatataatcacttctccggaactctgaatccaaacagtagcctctttgagttgcaccagctacgttaccttaatctcgcttttaacaactttagttcctcactcccttccaaatttggcaatctccatagattagagaacttgattctttcctctaatggcttttctggtcaagttccttccacaattagtaacctgacccggttaactaagttgtaccttgaccaaaacaagctcactagtagtttcccacttgtacagaatctaaccaacctctacgaattagacctttcatataataagttctttggagtcatcccttcttctctcctcactctgcctttcttagcacatcttgctctacgtgaaaacaatcttgctggttctgttgaagtttcaaactcctctacctcatctaggctcgaaatcatgtatctcgggtctaaccattttgaaggacaaatcctagagcctatctcaaagctcatcaacctcaagcatcttgacctttctttcctaaacacaagctacccaatagacttaaaactcttctcctccctcaaatctttgcggtcactggatctttctggaaacagtatatcttcggccagtttaagttcagattcatacatcccgttgaccctggaaatgttgaccttgaggcactgtgacatcaacgagttccccaacatcttaaagaccctcaaggagttggtgtatatagacatatccaacaacagaatgaaagggaagatccctgagtggttatggagcctacctcttctacagtcagtaactcttggaaataattatttcacaggtttccaaggttcggcggagattttagtaaattcatcagtgctgctattatatttggattcaaacaattttgaaggagcacttcctgatctaccactctctatcaaaggcttcggtgtggctagtaatagtttcacaagtgagatacctctttcaatctgcaaccgaagctctctcgctgctattgatctatcctacaacaacttcactggtcccattcctccatgtttgcgtaatttggaacttgtgtatctccggaacaacaacctggaaggaagtatccctgacgcgctctgtgatggtgcctctttacggacactcgatgttagccataaccgattaacagggaagcttccaaggtcttttgtaaactgctcatcgctaaagtttctaagcgttataaacaacagaattgaagatacgtttccgttctggctcaaagctttaccgaatttgcaagtccttactcttcgctcaaacagattttatggtcctatatctcctccgcatcaaggtcctctcgggtttccagagctgcggatatttgaaatatctgacaataagtttacaggaagcttgccaccaaactactttgtgaactggaaagcatcatcacgcacgatgaatcaagatgggggtttatatatggtatacgaggagaagctgttcgacgaaggcggctatggttatacagatgctttagatttgcaatacaaaggtctacacatggagcaagctaaggccctcacttcctacgccgccattgatttttctggaaatagactcgaaggacagattcctgaatctattggactcttgaaggcactgattgcagtcaatatatcaaacaacgccttcacaggccatattcccctgtctatggccaatcttgagaatctcgagtcactagacatgtcaagaaaccaactctcggggactattcctaatggactagggagcatttcgtttttggcgtacatcaacgtgtctcacaaccaactcacgggtgaaataccacaaggaacacagattactgggcaatctaaatcttccttcgaagggaatgcagggctttgtggtctacctctcaaggaaagttgcttcggcactggtgcacctccgatgtatcaccaaaagcaagaggacaaagaagaagaagaagaagaagaagaagaagaagaagaagtgttgaacgggagggttgcggcatggatcttagggtttgtcgttggagccataggaggaacaatctctgggtttgtcttttcggtgttgttcaaattgattattcaagcaataagaggatcagaaaaaccaccaggtccttccatattcagcccattgatcaagaaagctgaagatttagctttcttggagaatgaagaagcgttagcttctctggagatcataggaagaggaggttgtggagaagttttcaaagctgaactaccaggaagcaatgggaagatcatagctgtgaagaaagtgatccaaccgcctaaagacgccgatgaactaacagatgaagattccaagtttctgaacaagaaaatgaggcaaattagatccgagatcaacacagtcggccatatccggcaccggaatcttctcccattgttagcacacgtgtcaagacccgagtgccactacctcgtttacgagtacatggaaaaggggagtttgcaagatatattgactgacgtacaagctggaaatcaagaactaatgtggccagcgaggcacaagattgctttaggtatagctgcagggcttgagtaccttcacatggatcataacccacgaatcattcacagagacttaaagccagccaatgttcttcttgatgatgacatggaagccagaatttcagatttcggactggcaaaggcaatgccagatgcagtcacacatattacaacctcgcatgttgcaggtactgtgggatacatagcaccagagttttatcaaacccacaagttcacagataaatgtgatatctatagttttggagtgattcttgggattctggtgattgggaagcttccttcagatgagttttttcagcatactgacgagatgagtctgataaagtggatgaggaacataataacatcggaaaatcctagccttgcgattgatccgaagttgatggatcaaggattcgatgaacagatgcttctggttctgaagatcgcctgttactgtactttggatgatccaaaacagaggccgaacagtaaagatgtcaggaccatgttgtcccagatcaagcat

SEQ ID NO: 28 - protein, 1208 aa, Artificial Sequence
  Fusion protein
MSKALLHLHFLSLFLLCCVCHSSIFTLNFHFTGIVACRPHQIQAFTKFTNEFDTRGCNNSDTFNGVWCDNSTGAVAVLQLRKCLSGTLKSNSSLFGFHQLRYVDLQNNNLTSSSLPSGFGNLKRLEGLFLSSNGFLGQVPSSFSNLTMLAQLDLSYNKLTGSFPLVRGLRKLIVLDLSYNHFSGTLNPNSSLFELHQLRYLNLAFNNFSSSLPSKFGNLHRLENLILSSNGFSGQVPSTISNLTRLTKLYLDQNKLTSSFPLVQNLTNLYELDLSYNKFFGVIPSSLLTLPFLAHLALRENNLAGSVEVSNSSTSSRLEIMYLGSNHFEGQILEPISKLINLKHLDLSFLNTSYPIDLKLFSSLKSLRSLDLSGNSISSASLSSDSYIPLTLEMLTLRHCDINEFPNILKTLKELVYIDISNNRMKGKIPEWLWSLPLLQSVTLGNNYFTGFQGSAEILVNSSVLLLYLDSNNFEGALPDLPLSIKGFGVASNSFTSEIPLSICNRSSLAAIDLSYNNFTGPIPPCLRNLELVYLRNNNLEGSIPDALCDGASLRTLDVSHNRLTGKLPRSFVNCSSLKFLSVINNRIEDTFPFWLKALPNLQVLTLRSNRFYGPISPPHQGPLGFPELRIFEISDNKFTGSLPPNYFVNWKASSRTMNQDGGLYMVYEEKLFDEGGYGYTDALDLQYKGLHMEQAKALTSYAAIDFSGNRLEGQIPESIGLLKALIAVNISNNAFTGHIPLSMANLENLESLDMSRNQLSGTIPNGLGSISFLAYINVSHNQLTGEIPQGTQITGQSKSSFEGNAGLCGLPLKESCFGTGAPPMYHQKQEDKEEEEEEEEEEEEVLNGRVAAWILGFVVGAIGGTISGFVFSVLFKLIIQAIRGSEKPPGPSIFSPLIKKAEDLAFLENEEALASLEIIGRGGCGEVFKAELPGSNGKIIAVKKVIQPPKDADELTDEDSKFLNKKMRQIRSEINTVGHIRHRNLLPLLAHVSRPECHYLVYEYMEKGSLQDILTDVQAGNQELMWPARHKIALGIAAGLEYLHMDHNPRIIHRDLKPANVLLDDDMEARISDFGLAKAMPDAVTHITTSHVAGTVGYIAPEFYQTHKFTDKCDIYSFGVILGILVIGKLPSDEFFQHTDEMSLIKWMRNIITSENPSLAIDPKLMDQGFDEQMLLVLKIACYCTLDDPKQRPNSKDVRTMLSQIKH

SEQ ID NO: 29 - DNA, 3708 bp, Artificial Sequence
  Encodes fusioin protein
atgtcaaaggcgcttttgcatttgcattttctttctctgtttttactctgttgtgtctgccattcaagtatttttactttaaattttcattttactggtattgtggcctgtcgtccccaccagattcaagccttcacgaagttcacgaacgagtttgacacccgcggttgcaacaacagtgacacctttaatggagtctggtgcgataactcgacgggtgcggtcgcagtgctacaactaaggaagtgtctcagtggaactttgaagtccaacagtagcctcttcgggtttcatcaactccgttacgttgatctccaaaacaacaacttaacctcctcttcactcccttccgggtttggaaatctcaaaagattagagggcttgtttctttcctctaatggcttcctcggccaagttccttcctcattcagtaacctaacaatgcttgctcaattagacctttcttataacaagctcactggtagtttcccacttgtccggggtctaagaaagctcattgttttagacctttcatataatcacttctccggaactctgaatccaaacagtagcctctttgagttgcaccagctacgttaccttaatctcgcttttaacaactttagttcctcactcccttccaaatttggcaatctccatagattagagaacttgattctttcctctaatggcttttctggtcaagttccttccacaattagtaacctgacccggttaactaagttgtaccttgaccaaaacaagctcactagtagtttcccacttgtacagaatctaaccaacctctacgaattagacctttcatataataagttctttggagtcatcccttcttctctcctcactctgcctttcttagcacatcttgctctacgtgaaaacaatcttgctggttctgttgaagtttcaaactcctctacctcatctaggctcgaaatcatgtatctcgggtctaaccattttgaaggacaaatcctagagcctatctcaaagctcatcaacctcaagcatcttgacctttctttcctaaacacaagctacccaatagacttaaaactcttctcctccctcaaatctttgcggtcactggatctttctggaaacagtatatcttcggccagtttaagttcagattcatacatcccgttgaccctggaaatgttgaccttgaggcactgtgacatcaacgagttccccaacatcttaaagaccctcaaggagttggtgtatatagacatatccaacaacagaatgaaagggaagatccctgagtggttatggagcctacctcttctacagtcagtaactcttggaaataattatttcacaggtttccaaggttcggcggagattttagtaaattcatcagtgctgctattatatttggattcaaacaattttgaaggagcacttcctgatctaccactctctatcaaaggcttcggtgtggctagtaatagtttcacaagtgagatacctctttcaatctgcaaccgaagctctctcgctgctattgatctatcctacaacaacttcactggtcccattcctccatgtttgcgtaatttggaacttgtgtatctccggaacaacaacctggaaggaagtatccctgacgcgctctgtgatggtgcctctttacggacactcgatgttagccataaccgattaacagggaagcttccaaggtcttttgtaaactgctcatcgctaaagtttctaagcgttataaacaacagaattgaagatacgtttccgttctggctcaaagctttaccgaatttgcaagtccttactcttcgctcaaacagattttatggtcctatatctcctccgcatcaaggtcctctcgggtttccagagctgcggatatttgaaatatctgacaataagtttacaggaagcttgccaccaaactactttgtgaactggaaagcatcatcacgcacgatgaatcaagatgggggtttatatatggtatacgaggagaagctgttcgacgaaggcggctatggttatacagatgctttagatttgcaatacaaaggtctacacatggagcaagctaaggccctcacttcctacgccgccattgatttttctggaaatagactcgaaggacagattcctgaatctattggactcttgaaggcactgattgcagtcaatatatcaaacaacgccttcacaggccatattcccctgtctatggccaatcttgagaatctcgagtcactagacatgtcaagaaaccaactctcggggactattcctaatggactagggagcatttcgtttttggcgtacatcaacgtgtctcacaaccaactcacgggtgaaataccacaaggaacacagattactgggcaatctaaatcttccttcgaagggaatgcagggctttgtggtctacctctcaaggaaagttgcttcggcactggtgcacctccgatgtatcaccaaaagcaagaggacaaagaagaagaagaagaagaagaagaagaagaagaagaagtgttgaacgggagggttgcggcatggatcttagggtttgtcgttggagccataggaggaacaatctctgggtttgtcttttcggtgttgttcaaattgattattcaagcaataagaggatcagaaaaaccaccaggtccttccatattcagcccattgatcaagaaagctgaagatttagctttcttggagaatgaagaagcgttagcttctctggagatcataggaagaggaggttgtggagaagttttcaaagctgaactaccaggaagcaatgggaagatcatagctgtgaagaaagtgatccaaccgcctaaagacgccgatgaactaacagatgaagattccaagtttctgaacaagaaaatgaggcaaattagatccgagatcaacacagtcggccatatccggcaccggaatcttctcccattgttagcacacgtgtcaagacccgagtgccactacctcgtttacgagtacatggaaaaggggagtttgcaagatatattgactgacgtacaagctggaaatcaagaactaatgtggccagcgaggcacaagattgctttaggtatagctgcagggcttgagtaccttcacatggatcataacccacgaatcattcacagagacttaaagccagccaatgttcttcttgatgatgacatggaagccagaatttcagatttcggactggcaaaggcaatgccagatgcagtcacacatattacaacctcgcatgttgcaggtactgtgggatacatagcaccagagttttatcaaacccacaagttcacagataaatgtgatatctatagttttggagtgattcttgggattctggtgattgggaagcttccttcagatgagttttttcagcatactgacgagatgagtctgataaagtggatgaggaacataataacatcggaaaatcctagccttgcgattgatccgaagttgatggatcaaggattcgatgaacagatgcttctggttctgaagatcgcctgttactgtactttggatgatccaaaacagaggccgaacagtaaagatgtcaggaccatgttgtcccagatcaagcattcggattataaggaccatgacggagactataaggaccatgacctcgacgctgcagcagcggattataaggacgatgacgataag

SEQ ID NO: 30 - protein, 1236 aa, Artificial Sequence
  Fusion protein
MSKALLHLHFLSLFLLCCVCHSSIFTLNFHFTGIVACRPHQIQAFTKFTNEFDTRGCNNSDTFNGVWCDNSTGAVAVLQLRKCLSGTLKSNSSLFGFHQLRYVDLQNNNLTSSSLPSGFGNLKRLEGLFLSSNGFLGQVPSSFSNLTMLAQLDLSYNKLTGSFPLVRGLRKLIVLDLSYNHFSGTLNPNSSLFELHQLRYLNLAFNNFSSSLPSKFGNLHRLENLILSSNGFSGQVPSTISNLTRLTKLYLDQNKLTSSFPLVQNLTNLYELDLSYNKFFGVIPSSLLTLPFLAHLALRENNLAGSVEVSNSSTSSRLEIMYLGSNHFEGQILEPISKLINLKHLDLSFLNTSYPIDLKLFSSLKSLRSLDLSGNSISSASLSSDSYIPLTLEMLTLRHCDINEFPNILKTLKELVYIDISNNRMKGKIPEWLWSLPLLQSVTLGNNYFTGFQGSAEILVNSSVLLLYLDSNNFEGALPDLPLSIKGFGVASNSFTSEIPLSICNRSSLAAIDLSYNNFTGPIPPCLRNLELVYLRNNNLEGSIPDALCDGASLRTLDVSHNRLTGKLPRSFVNCSSLKFLSVINNRIEDTFPFWLKALPNLQVLTLRSNRFYGPISPPHQGPLGFPELRIFEISDNKFTGSLPPNYFVNWKASSRTMNQDGGLYMVYEEKLFDEGGYGYTDALDLQYKGLHMEQAKALTSYAAIDFSGNRLEGQIPESIGLLKALIAVNISNNAFTGHIPLSMANLENLESLDMSRNQLSGTIPNGLGSISFLAYINVSHNQLTGEIPQGTQITGQSKSSFEGNAGLCGLPLKESCFGTGAPPMYHQKQEDKEEEEEEEEEEEEVLNGRVAAWILGFVVGAIGGTISGFVFSVLFKLIIQAIRGSEKPPGPSIFSPLIKKAEDLAFLENEEALASLEIIGRGGCGEVFKAELPGSNGKIIAVKKVIQPPKDADELTDEDSKFLNKKMRQIRSEINTVGHIRHRNLLPLLAHVSRPECHYLVYEYMEKGSLQDILTDVQAGNQELMWPARHKIALGIAAGLEYLHMDHNPRIIHRDLKPANVLLDDDMEARISDFGLAKAMPDAVTHITTSHVAGTVGYIAPEFYQTHKFTDKCDIYSFGVILGILVIGKLPSDEFFQHTDEMSLIKWMRNIITSENPSLAIDPKLMDQGFDEQMLLVLKIACYCTLDDPKQRPNSKDVRTMLSQIKHSDYKDHDGDYKDHDLDAAAADYKDDDDK

SEQ ID NO: 31 - DNA, 3777 bp, Artificial Sequence
  Encodes fusion protein
atgtcaaaggcgcttttgcatttgcattttctttctctgtttttactctgttgtgtctgccattcaagtatttttactttaaattttcattttactggtattgtggcctgtcgtccccaccagattcaagccttcacgaagttcacgaacgagtttgacacccgcggttgcaacaacagtgacacctttaatggagtctggtgcgataactcgacgggtgcggtcgcagtgctacaactaaggaagtgtctcagtggaactttgaagtccaacagtagcctcttcgggtttcatcaactccgttacgttgatctccaaaacaacaacttaacctcctcttcactcccttccgggtttggaaatctcaaaagattagagggcttgtttctttcctctaatggcttcctcggccaagttccttcctcattcagtaacctaacaatgcttgctcaattagacctttcttataacaagctcactggtagtttcccacttgtccggggtctaagaaagctcattgttttagacctttcatataatcacttctccggaactctgaatccaaacagtagcctctttgagttgcaccagctacgttaccttaatctcgcttttaacaactttagttcctcactcccttccaaatttggcaatctccatagattagagaacttgattctttcctctaatggcttttctggtcaagttccttccacaattagtaacctgacccggttaactaagttgtaccttgaccaaaacaagctcactagtagtttcccacttgtacagaatctaaccaacctctacgaattagacctttcatataataagttctttggagtcatcccttcttctctcctcactctgcctttcttagcacatcttgctctacgtgaaaacaatcttgctggttctgttgaagtttcaaactcctctacctcatctaggctcgaaatcatgtatctcgggtctaaccattttgaaggacaaatcctagagcctatctcaaagctcatcaacctcaagcatcttgacctttctttcctaaacacaagctacccaatagacttaaaactcttctcctccctcaaatctttgcggtcactggatctttctggaaacagtatatcttcggccagtttaagttcagattcatacatcccgttgaccctggaaatgttgaccttgaggcactgtgacatcaacgagttccccaacatcttaaagaccctcaaggagttggtgtatatagacatatccaacaacagaatgaaagggaagatccctgagtggttatggagcctacctcttctacagtcagtaactcttggaaataattatttcacaggtttccaaggttcggcggagattttagtaaattcatcagtgctgctattatatttggattcaaacaattttgaaggagcacttcctgatctaccactctctatcaaaggcttcggtgtggctagtaatagtttcacaagtgagatacctctttcaatctgcaaccgaagctctctcgctgctattgatctatcctacaacaacttcactggtcccattcctccatgtttgcgtaatttggaacttgtgtatctccggaacaacaacctggaaggaagtatccctgacgcgctctgtgatggtgcctctttacggacactcgatgttagccataaccgattaacagggaagcttccaaggtcttttgtaaactgctcatcgctaaagtttctaagcgttataaacaacagaattgaagatacgtttccgttctggctcaaagctttaccgaatttgcaagtccttactcttcgctcaaacagattttatggtcctatatctcctccgcatcaaggtcctctcgggtttccagagctgcggatatttgaaatatctgacaataagtttacaggaagcttgccaccaaactactttgtgaactggaaagcatcatcacgcacgatgaatcaagatgggggtttatatatggtatacgaggagaagctgttcgacgaaggcggctatggttatacagatgctttagatttgcaatacaaaggtctacacatggagcaagctaaggccctcacttcctacgccgccattgatttttctggaaatagactcgaaggacagattcctgaatctattggactcttgaaggcactgattgcagtcaatatatcaaacaacgccttcacaggccatattcccctgtctatggccaatcttgagaatctcgagtcactagacatgtcaagaaaccaactctcggggactattcctaatggactagggagcatttcgtttttggcgtacatcaacgtgtctcacaaccaactcacgggtgaaataccacaaggaacacagattactgggcaatctaaatcttccttcgaagggaatgcagggctttgtggtctacctctcaaggaaagttgcttcggcactggtgcacctccgatgtatcaccaaaagcaagaggacaaagaagaagaagaagaagaagaagaagaagaagaagaagtgttgaacgggagagcagtggcaatagggtatggatctggattattgcttggattggcaatagcacaagttattgcttcatacaaaaggaaaaagaaaaacaatgccagtgatggtaacccatctgattctactactttggggatgttccatgagaaggtaagttatgaagagcttcatagtgcaacaagtcgcttctcttcaaccaatttgattggttcaggcaatttcggtaatgtgtttaaaggattgcttggccctgagaataaactcgtcgcggttaaagttttgaacctcctaaagcatggagcgacgaaaagctttatggcggaatgtgaaaccttcaagggtatacgacatcgtaaccttgtaaaactgataacggtttgttcaagccttgattccgagggaaatgatttcagagctctggtctatgagttcatgccaaaaggaagtctggatatgtggctgcagctagaagatctggaaagggtaaacgatcactcgagatctttaacacccgcagagaaactcaacatagcaatagatgtggcttcagctttggagtatctgcacgttcattgtcatgaccctgtagctcactgtgatattaagccaagcaacattcttctagacgatgatctgactgctcatgttagtgactttggtttggctcagctcctctataaatacgatcgagaatcctttctaaaccagtttagttctgctggtgtcagaggcaccattggctatgccgcgccaggttaataaacatctatatgcaaaaagtattgtttaacaaaagagttatccaacctcattgtgtgttgtttctttgaaatatgtgcagagtatggaatgggaggccaaccatcaatacaaggagatgtgtacagcttcggaattctacttttggagatgtttagtggaaagaaaccaacagatgaatcatttgcaggcgattataacctccacagctacacaaagtctatattatcgggttgcacgagcagtggaggcagcaacgccattgatgaggggttgagactggttttgcaggtggggataaagtgttctgaagaatatccgagggataggatgagaacggatgaagcagtacgagaattaatctcaataagatctaagttcttcagttccaagacgactattacagagagtcctcgagatgctccgcaaagttctcctcaggaatggatgttaaatacggacatgcatactatg

SEQ ID NO: 32 - protein, 1230 aa, Artificial Sequence
  Fusion protein
MSKALLHLHFLSLFLLCCVCHSSIFTLNFHFTGIVACRPHQIQAFTKFTNEFDTRGCNNSDTFNGVWCDNSTGAVAVLQLRKCLSGTLKSNSSLFGFHQLRYVDLQNNNLTSSSLPSGFGNLKRLEGLFLSSNGFLGQVPSSFSNLTMLAQLDLSYNKLTGSFPLVRGLRKLIVLDLSYNHFSGTLNPNSSLFELHQLRYLNLAFNNFSSSLPSKFGNLHRLENLILSSNGFSGQVPSTISNLTRLTKLYLDQNKLTSSFPLVQNLTNLYELDLSYNKFFGVIPSSLLTLPFLAHLALRENNLAGSVEVSNSSTSSRLEIMYLGSNHFEGQILEPISKLINLKHLDLSFLNTSYPIDLKLFSSLKSLRSLDLSGNSISSASLSSDSYIPLTLEMLTLRHCDINEFPNILKTLKELVYIDISNNRMKGKIPEWLWSLPLLQSVTLGNNYFTGFQGSAEILVNSSVLLLYLDSNNFEGALPDLPLSIKGFGVASNSFTSEIPLSICNRSSLAAIDLSYNNFTGPIPPCLRNLELVYLRNNNLEGSIPDALCDGASLRTLDVSHNRLTGKLPRSFVNCSSLKFLSVINNRIEDTFPFWLKALPNLQVLTLRSNRFYGPISPPHQGPLGFPELRIFEISDNKFTGSLPPNYFVNWKASSRTMNQDGGLYMVYEEKLFDEGGYGYTDALDLQYKGLHMEQAKALTSYAAIDFSGNRLEGQIPESIGLLKALIAVNISNNAFTGHIPLSMANLENLESLDMSRNQLSGTIPNGLGSISFLAYINVSHNQLTGEIPQGTQITGQSKSSFEGNAGLCGLPLKESCFGTGAPPMYHQKQEDKEEEEEEEEEEEEVLNGRAVAIGYGSGLLLGLAIAQVIASYKRKKKNNASDGNPSDSTTLGMFHEKVSYEELHSATSRFSSTNLIGSGNFGNVFKGLLGPENKLVAVKVLNLLKHGATKSFMAECETFKGIRHRNLVKLITVCSSLDSEGNDFRALVYEFMPKGSLDMWLQLEDLERVNDHSRSLTPAEKLNIAIDVASALEYLHVHCHDPVAHCDIKPSNILLDDDLTAHVSDFGLAQLLYKYDRESFLNQFSSAGVRGTIGYAAPEYGMGGQPSIQGDVYSFGILLLEMFSGKKPTDESFAGDYNLHSYTKSILSGCTSSGGSNAIDEGLRLVLQVGIKCSEEYPRDRMRTDEAVRELISIRSKFFSSKTTITESPRDAPQSSPQEWMLNTDMHTM

SEQ ID NO: 33 - DNA, 3864 bp, Artificial Sequence
  Encodes fusion protein
atgtcaaaggcgcttttgcatttgcattttctttctctgtttttactctgttgtgtctgccattcaagtatttttactttaaattttcattttactggtattgtggcctgtcgtccccaccagattcaagccttcacgaagttcacgaacgagtttgacacccgcggttgcaacaacagtgacacctttaatggagtctggtgcgataactcgacgggtgcggtcgcagtgctacaactaaggaagtgtctcagtggaactttgaagtccaacagtagcctcttcgggtttcatcaactccgttacgttgatctccaaaacaacaacttaacctcctcttcactcccttccgggtttggaaatctcaaaagattagagggcttgtttctttcctctaatggcttcctcggccaagttccttcctcattcagtaacctaacaatgcttgctcaattagacctttcttataacaagctcactggtagtttcccacttgtccggggtctaagaaagctcattgttttagacctttcatataatcacttctccggaactctgaatccaaacagtagcctctttgagttgcaccagctacgttaccttaatctcgcttttaacaactttagttcctcactcccttccaaatttggcaatctccatagattagagaacttgattctttcctctaatggcttttctggtcaagttccttccacaattagtaacctgacccggttaactaagttgtaccttgaccaaaacaagctcactagtagtttcccacttgtacagaatctaaccaacctctacgaattagacctttcatataataagttctttggagtcatcccttcttctctcctcactctgcctttcttagcacatcttgctctacgtgaaaacaatcttgctggttctgttgaagtttcaaactcctctacctcatctaggctcgaaatcatgtatctcgggtctaaccattttgaaggacaaatcctagagcctatctcaaagctcatcaacctcaagcatcttgacctttctttcctaaacacaagctacccaatagacttaaaactcttctcctccctcaaatctttgcggtcactggatctttctggaaacagtatatcttcggccagtttaagttcagattcatacatcccgttgaccctggaaatgttgaccttgaggcactgtgacatcaacgagttccccaacatcttaaagaccctcaaggagttggtgtatatagacatatccaacaacagaatgaaagggaagatccctgagtggttatggagcctacctcttctacagtcagtaactcttggaaataattatttcacaggtttccaaggttcggcggagattttagtaaattcatcagtgctgctattatatttggattcaaacaattttgaaggagcacttcctgatctaccactctctatcaaaggcttcggtgtggctagtaatagtttcacaagtgagatacctctttcaatctgcaaccgaagctctctcgctgctattgatctatcctacaacaacttcactggtcccattcctccatgtttgcgtaatttggaacttgtgtatctccggaacaacaacctggaaggaagtatccctgacgcgctctgtgatggtgcctctttacggacactcgatgttagccataaccgattaacagggaagcttccaaggtcttttgtaaactgctcatcgctaaagtttctaagcgttataaacaacagaattgaagatacgtttccgttctggctcaaagctttaccgaatttgcaagtccttactcttcgctcaaacagattttatggtcctatatctcctccgcatcaaggtcctctcgggtttccagagctgcggatatttgaaatatctgacaataagtttacaggaagcttgccaccaaactactttgtgaactggaaagcatcatcacgcacgatgaatcaagatgggggtttatatatggtatacgaggagaagctgttcgacgaaggcggctatggttatacagatgctttagatttgcaatacaaaggtctacacatggagcaagctaaggccctcacttcctacgccgccattgatttttctggaaatagactcgaaggacagattcctgaatctattggactcttgaaggcactgattgcagtcaatatatcaaacaacgccttcacaggccatattcccctgtctatggccaatcttgagaatctcgagtcactagacatgtcaagaaaccaactctcggggactattcctaatggactagggagcatttcgtttttggcgtacatcaacgtgtctcacaaccaactcacgggtgaaataccacaaggaacacagattactgggcaatctaaatcttccttcgaagggaatgcagggctttgtggtctacctctcaaggaaagttgcttcggcactggtgcacctccgatgtatcaccaaaagcaagaggacaaagaagaagaagaagaagaagaagaagaagaagaagaagtgttgaacgggagagcagtggcaatagggtatggatctggattattgcttggattggcaatagcacaagttattgcttcatacaaaaggaaaaagaaaaacaatgccagtgatggtaacccatctgattctactactttggggatgttccatgagaaggtaagttatgaagagcttcatagtgcaacaagtcgcttctcttcaaccaatttgattggttcaggcaatttcggtaatgtgtttaaaggattgcttggccctgagaataaactcgtcgcggttaaagttttgaacctcctaaagcatggagcgacgaaaagctttatggcggaatgtgaaaccttcaagggtatacgacatcgtaaccttgtaaaactgataacggtttgttcaagccttgattccgagggaaatgatttcagagctctggtctatgagttcatgccaaaaggaagtctggatatgtggctgcagctagaagatctggaaagggtaaacgatcactcgagatctttaacacccgcagagaaactcaacatagcaatagatgtggcttcagctttggagtatctgcacgttcattgtcatgaccctgtagctcactgtgatattaagccaagcaacattcttctagacgatgatctgactgctcatgttagtgactttggtttggctcagctcctctataaatacgatcgagaatcctttctaaaccagtttagttctgctggtgtcagaggcaccattggctatgccgcgccaggttaataaacatctatatgcaaaaagtattgtttaacaaaagagttatccaacctcattgtgtgttgtttctttgaaatatgtgcagagtatggaatgggaggccaaccatcaatacaaggagatgtgtacagcttcggaattctacttttggagatgtttagtggaaagaaaccaacagatgaatcatttgcaggcgattataacctccacagctacacaaagtctatattatcgggttgcacgagcagtggaggcagcaacgccattgatgaggggttgagactggttttgcaggtggggataaagtgttctgaagaatatccgagggataggatgagaacggatgaagcagtacgagaattaatctcaataagatctaagttcttcagttccaagacgactattacagagagtcctcgagatgctccgcaaagttctcctcaggaatggatgttaaatacggacatgcatactatggcttcggattataaggaccatgacggagactataaggaccatgacctcgacgctgcagcagcggattataaggacgatgacgataag

SEQ ID NO: 34 - protein, 1259 aa, Artificial Sequence
  Fusion protein
MSKALLHLHFLSLFLLCCVCHSSIFTLNFHFTGIVACRPHQIQAFTKFTNEFDTRGCNNSDTFNGVWCDNSTGAVAVLQLRKCLSGTLKSNSSLFGFHQLRYVDLQNNNLTSSSLPSGFGNLKRLEGLFLSSNGFLGQVPSSFSNLTMLAQLDLSYNKLTGSFPLVRGLRKLIVLDLSYNHFSGTLNPNSSLFELHQLRYLNLAFNNFSSSLPSKFGNLHRLENLILSSNGFSGQVPSTISNLTRLTKLYLDQNKLTSSFPLVQNLTNLYELDLSYNKFFGVIPSSLLTLPFLAHLALRENNLAGSVEVSNSSTSSRLEIMYLGSNHFEGQILEPISKLINLKHLDLSFLNTSYPIDLKLFSSLKSLRSLDLSGNSISSASLSSDSYIPLTLEMLTLRHCDINEFPNILKTLKELVYIDISNNRMKGKIPEWLWSLPLLQSVTLGNNYFTGFQGSAEILVNSSVLLLYLDSNNFEGALPDLPLSIKGFGVASNSFTSEIPLSICNRSSLAAIDLSYNNFTGPIPPCLRNLELVYLRNNNLEGSIPDALCDGASLRTLDVSHNRLTGKLPRSFVNCSSLKFLSVINNRIEDTFPFWLKALPNLQVLTLRSNRFYGPISPPHQGPLGFPELRIFEISDNKFTGSLPPNYFVNWKASSRTMNQDGGLYMVYEEKLFDEGGYGYTDALDLQYKGLHMEQAKALTSYAAIDFSGNRLEGQIPESIGLLKALIAVNISNNAFTGHIPLSMANLENLESLDMSRNQLSGTIPNGLGSISFLAYINVSHNQLTGEIPQGTQITGQSKSSFEGNAGLCGLPLKESCFGTGAPPMYHQKQEDKEEEEEEEEEEEEVLNGRAVAIGYGSGLLLGLAIAQVIASYKRKKKNNASDGNPSDSTTLGMFHEKVSYEELHSATSRFSSTNLIGSGNFGNVFKGLLGPENKLVAVKVLNLLKHGATKSFMAECETFKGIRHRNLVKLITVCSSLDSEGNDFRALVYEFMPKGSLDMWLQLEDLERVNDHSRSLTPAEKLNIAIDVASALEYLHVHCHDPVAHCDIKPSNILLDDDLTAHVSDFGLAQLLYKYDRESFLNQFSSAGVRGTIGYAAPEYGMGGQPSIQGDVYSFGILLLEMFSGKKPTDESFAGDYNLHSYTKSILSGCTSSGGSNAIDEGLRLVLQVGIKCSEEYPRDRMRTDEAVRELISIRSKFFSSKTTITESPRDAPQSSPQEWMLNTDMHTMASDYKDHDGDYKDHDLDAAAADYKDDDDK

SEQ ID NO: 35 - DNA, 3972 bp, Artificial Sequence
  Encodes fusion protein
atgtcaaaggcgcttttgcatttgcattttctttctctgtttttactctgttgtgtctgccattcaagtatttttactttaaattttcattttactggtattgtggcctgtcgtccccaccagattcaagccttcacgaagttcacgaacgagtttgacacccgcggttgcaacaacagtgacacctttaatggagtctggtgcgataactcgacgggtgcggtcgcagtgctacaactaaggaagtgtctcagtggaactttgaagtccaacagtagcctcttcgggtttcatcaactccgttacgttgatctccaaaacaacaacttaacctcctcttcactcccttccgggtttggaaatctcaaaagattagagggcttgtttctttcctctaatggcttcctcggccaagttccttcctcattcagtaacctaacaatgcttgctcaattagacctttcttataacaagctcactggtagtttcccacttgtccggggtctaagaaagctcattgttttagacctttcatataatcacttctccggaactctgaatccaaacagtagcctctttgagttgcaccagctacgttaccttaatctcgcttttaacaactttagttcctcactcccttccaaatttggcaatctccatagattagagaacttgattctttcctctaatggcttttctggtcaagttccttccacaattagtaacctgacccggttaactaagttgtaccttgaccaaaacaagctcactagtagtttcccacttgtacagaatctaaccaacctctacgaattagacctttcatataataagttctttggagtcatcccttcttctctcctcactctgcctttcttagcacatcttgctctacgtgaaaacaatcttgctggttctgttgaagtttcaaactcctctacctcatctaggctcgaaatcatgtatctcgggtctaaccattttgaaggacaaatcctagagcctatctcaaagctcatcaacctcaagcatcttgacctttctttcctaaacacaagctacccaatagacttaaaactcttctcctccctcaaatctttgcggtcactggatctttctggaaacagtatatcttcggccagtttaagttcagattcatacatcccgttgaccctggaaatgttgaccttgaggcactgtgacatcaacgagttccccaacatcttaaagaccctcaaggagttggtgtatatagacatatccaacaacagaatgaaagggaagatccctgagtggttatggagcctacctcttctacagtcagtaactcttggaaataattatttcacaggtttccaaggttcggcggagattttagtaaattcatcagtgctgctattatatttggattcaaacaattttgaaggagcacttcctgatctaccactctctatcaaaggcttcggtgtggctagtaatagtttcacaagtgagatacctctttcaatctgcaaccgaagctctctcgctgctattgatctatcctacaacaacttcactggtcccattcctccatgtttgcgtaatttggaacttgtgtatctccggaacaacaacctggaaggaagtatccctgacgcgctctgtgatggtgcctctttacggacactcgatgttagccataaccgattaacagggaagcttccaaggtcttttgtaaactgctcatcgctaaagtttctaagcgttataaacaacagaattgaagatacgtttccgttctggctcaaagctttaccgaatttgcaagtccttactcttcgctcaaacagattttatggtcctatatctcctccgcatcaaggtcctctcgggtttccagagctgcggatatttgaaatatctgacaataagtttacaggaagcttgccaccaaactactttgtgaactggaaagcatcatcacgcacgatgaatcaagatgggggtttatatatggtatacgaggagaagctgttcgacgaaggcggctatggttatacagatgctttagatttgcaatacaaaggtctacacatggagcaagctaaggccctcacttcctacgccgccattgatttttctggaaatagactcgaaggacagattcctgaatctattggactcttgaaggcactgattgcagtcaatatatcaaacaacgccttcacaggccatattcccctgtctatggccaatcttgagaatctcgagtcactagacatgtcaagaaaccaactctcggggactattcctaatggactagggagcatttcgtttttggcgtacatcaacgtgtctcacaaccaactcacgggtgaaataccacaaggaacacagattactgggcaatctaaatcttccttcgaagggaatgcagggctttgtggtctacctctcaaggaaagttgcttcggcactggtgcacctccgatgtatcaccaaaagcaagaggacaaagaagaagaagaagaagaagaagaagaagaagaagaagtgttgaacgggagagcagtggcaatagggtatggatctggattattgcttggattggcaatagcacaagttattgcttcataccgaaggaaaaagccgcaggaccacttctttgatgtaccaggttagctaaacttgctttacctgtttcctcattaacacttctcttgctgatttttttttattaccgtctttttgcagctgaagaggacccagaagttcatttaggacaactgaagaggttttcattgcgtgaactacaagttgcttcggataattttagcaacaagaacatattgggtagaggtggttttggtaaagtttataaaggacggttagctgatggtactttagtggccgttaaaaggctaaaagaggagcgcacccaaggtggcgaactgcagttccagacagaggttgagatgattagtatggcggttcacagaaacttgcttcggcttcgtggattttgcatgactccaaccgaaagattgcttgtttatccctacatggctaatggaagtgttgcctcctgtttaagaggtatctctcatcttgtgcctttttctttgactgcaatatttccgtccaatggttgcctttttatccgtagtaatcttatattttattttctccttagaacgtcccgagtcccagccaccacttgattggccaaagagacagcgtattgcgttgggatctgcaagagggcttgcgtatttacatgatcattgcgacccaaagattattcatcgagatgtgaaagctgcaaatattttgttggatgaagagtttgaagccgtggttggggattttggacttgcaaaactcatggactacaaagacacacatgtgacaaccgcagtgcgtgggacaattggtcatatagcccctgagtacctttccactggaaaatcatcagagaaaaccgatgtctttgggtatggagtcatgcttcttgagcttatcactggacaaagggcttttgatcttgctcgcctcgcgaatgatgatgatgtcatgttactagactgggtatatacatatatgagtttcccacttgtatagttcattatctgtgttacctctatttgtgttaattattcatttcgacaggtgaaagggttgttaaaagagaagaaattggaagcactagtagatgttgatcttcagggtaattacaaagacgaagaagtggagcagctaatccaagtggctttactctgcactcagagttcaccaatggaaagacccaaaatgtctgaagttgtaagaatgcttgaaggagatggtttagctgagagatgggaagagtggcaaaaggaggaaatgttcagacaagatttcaactacccaacccaccatccagccgtgtctggctggatcattggcgattccacttcccagatcgaaaacgaatacccctcgggtccacgt

SEQ ID NO: 36 - protein, 1239 aa, Artificial Sequence
  Fusion protein
MSKALLHLHFLSLFLLCCVCHSSIFTLNFHFTGIVACRPHQIQAFTKFTNEFDTRGCNNSDTFNGVWCDNSTGAVAVLQLRKCLSGTLKSNSSLFGFHQLRYVDLQNNNLTSSSLPSGFGNLKRLEGLFLSSNGFLGQVPSSFSNLTMLAQLDLSYNKLTGSFPLVRGLRKLIVLDLSYNHFSGTLNPNSSLFELHQLRYLNLAFNNFSSSLPSKFGNLHRLENLILSSNGFSGQVPSTISNLTRLTKLYLDQNKLTSSFPLVQNLTNLYELDLSYNKFFGVIPSSLLTLPFLAHLALRENNLAGSVEVSNSSTSSRLEIMYLGSNHFEGQILEPISKLINLKHLDLSFLNTSYPIDLKLFSSLKSLRSLDLSGNSISSASLSSDSYIPLTLEMLTLRHCDINEFPNILKTLKELVYIDISNNRMKGKIPEWLWSLPLLQSVTLGNNYFTGFQGSAEILVNSSVLLLYLDSNNFEGALPDLPLSIKGFGVASNSFTSEIPLSICNRSSLAAIDLSYNNFTGPIPPCLRNLELVYLRNNNLEGSIPDALCDGASLRTLDVSHNRLTGKLPRSFVNCSSLKFLSVINNRIEDTFPFWLKALPNLQVLTLRSNRFYGPISPPHQGPLGFPELRIFEISDNKFTGSLPPNYFVNWKASSRTMNQDGGLYMVYEEKLFDEGGYGYTDALDLQYKGLHMEQAKALTSYAAIDFSGNRLEGQIPESIGLLKALIAVNISNNAFTGHIPLSMANLENLESLDMSRNQLSGTIPNGLGSISFLAYINVSHNQLTGEIPQGTQITGQSKSSFEGNAGLCGLPLKESCFGTGAPPMYHQKQEDKEEEEEEEEEEEEVLNGRAVAIGYGSGLLLGLAIAQVIASYRRKKPQDHFFDVPAEEDPEVHLGQLKRFSLRELQVASDNFSNKNILGRGGFGKVYKGRLADGTLVAVKRLKEERTQGGELQFQTEVEMISMAVHRNLLRLRGFCMTPTERLLVYPYMANGSVASCLRERPESQPPLDWPKRQRIALGSARGLAYLHDHCDPKIIHRDVKAANILLDEEFEAVVGDFGLAKLMDYKDTHVTTAVRGTIGHIAPEYLSTGKSSEKTDVFGYGVMLLELITGQRAFDLARLANDDDVMLLDWVKGLLKEKKLEALVDVDLQGNYKDEEVEQLIQVALLCTQSSPMERPKMSEVVRMLEGDGLAERWEEWQKEEMFRQDFNYPTHHPAVSGWIIGDSTSQIENEYPSGPR

SEQ ID NO: 37 - DNA, 4056 bp, Artificial Sequence
  Encodes fusion protein
atgtcaaaggcgcttttgcatttgcattttctttctctgtttttactctgttgtgtctgccattcaagtatttttactttaaattttcattttactggtattgtggcctgtcgtccccaccagattcaagccttcacgaagttcacgaacgagtttgacacccgcggttgcaacaacagtgacacctttaatggagtctggtgcgataactcgacgggtgcggtcgcagtgctacaactaaggaagtgtctcagtggaactttgaagtccaacagtagcctcttcgggtttcatcaactccgttacgttgatctccaaaacaacaacttaacctcctcttcactcccttccgggtttggaaatctcaaaagattagagggcttgtttctttcctctaatggcttcctcggccaagttccttcctcattcagtaacctaacaatgcttgctcaattagacctttcttataacaagctcactggtagtttcccacttgtccggggtctaagaaagctcattgttttagacctttcatataatcacttctccggaactctgaatccaaacagtagcctctttgagttgcaccagctacgttaccttaatctcgcttttaacaactttagttcctcactcccttccaaatttggcaatctccatagattagagaacttgattctttcctctaatggcttttctggtcaagttccttccacaattagtaacctgacccggttaactaagttgtaccttgaccaaaacaagctcactagtagtttcccacttgtacagaatctaaccaacctctacgaattagacctttcatataataagttctttggagtcatcccttcttctctcctcactctgcctttcttagcacatcttgctctacgtgaaaacaatcttgctggttctgttgaagtttcaaactcctctacctcatctaggctcgaaatcatgtatctcgggtctaaccattttgaaggacaaatcctagagcctatctcaaagctcatcaacctcaagcatcttgacctttctttcctaaacacaagctacccaatagacttaaaactcttctcctccctcaaatctttgcggtcactggatctttctggaaacagtatatcttcggccagtttaagttcagattcatacatcccgttgaccctggaaatgttgaccttgaggcactgtgacatcaacgagttccccaacatcttaaagaccctcaaggagttggtgtatatagacatatccaacaacagaatgaaagggaagatccctgagtggttatggagcctacctcttctacagtcagtaactcttggaaataattatttcacaggtttccaaggttcggcggagattttagtaaattcatcagtgctgctattatatttggattcaaacaattttgaaggagcacttcctgatctaccactctctatcaaaggcttcggtgtggctagtaatagtttcacaagtgagatacctctttcaatctgcaaccgaagctctctcgctgctattgatctatcctacaacaacttcactggtcccattcctccatgtttgcgtaatttggaacttgtgtatctccggaacaacaacctggaaggaagtatccctgacgcgctctgtgatggtgcctctttacggacactcgatgttagccataaccgattaacagggaagcttccaaggtcttttgtaaactgctcatcgctaaagtttctaagcgttataaacaacagaattgaagatacgtttccgttctggctcaaagctttaccgaatttgcaagtccttactcttcgctcaaacagattttatggtcctatatctcctccgcatcaaggtcctctcgggtttccagagctgcggatatttgaaatatctgacaataagtttacaggaagcttgccaccaaactactttgtgaactggaaagcatcatcacgcacgatgaatcaagatgggggtttatatatggtatacgaggagaagctgttcgacgaaggcggctatggttatacagatgctttagatttgcaatacaaaggtctacacatggagcaagctaaggccctcacttcctacgccgccattgatttttctggaaatagactcgaaggacagattcctgaatctattggactcttgaaggcactgattgcagtcaatatatcaaacaacgccttcacaggccatattcccctgtctatggccaatcttgagaatctcgagtcactagacatgtcaagaaaccaactctcggggactattcctaatggactagggagcatttcgtttttggcgtacatcaacgtgtctcacaaccaactcacgggtgaaataccacaaggaacacagattactgggcaatctaaatcttccttcgaagggaatgcagggctttgtggtctacctctcaaggaaagttgcttcggcactggtgcacctccgatgtatcaccaaaagcaagaggacaaagaagaagaagaagaagaagaagaagaagaagaagaagtgttgaacgggagagcagtggcaatagggtatggatctggattattgcttggattggcaatagcacaagttattgcttcataccgaaggaaaaagccgcaggaccacttctttgatgtaccaggttagctaaacttgctttacctgtttcctcattaacacttctcttgctgatttttttttattaccgtctttttgcagctgaagaggacccagaagttcatttaggacaactgaagaggttttcattgcgtgaactacaagttgcttcggataattttagcaacaagaacatattgggtagaggtggttttggtaaagtttataaaggacggttagctgatggtactttagtggccgttaaaaggctaaaagaggagcgcacccaaggtggcgaactgcagttccagacagaggttgagatgattagtatggcggttcacagaaacttgcttcggcttcgtggattttgcatgactccaaccgaaagattgcttgtttatccctacatggctaatggaagtgttgcctcctgtttaagaggtatctctcatcttgtgcctttttctttgactgcaatatttccgtccaatggttgcctttttatccgtagtaatcttatattttattttctccttagaacgtcccgagtcccagccaccacttgattggccaaagagacagcgtattgcgttgggatctgcaagagggcttgcgtatttacatgatcattgcgacccaaagattattcatcgagatgtgaaagctgcaaatattttgttggatgaagagtttgaagccgtggttggggattttggacttgcaaaactcatggactacaaagacacacatgtgacaaccgcagtgcgtgggacaattggtcatatagcccctgagtacctttccactggaaaatcatcagagaaaaccgatgtctttgggtatggagtcatgcttcttgagcttatcactggacaaagggcttttgatcttgctcgcctcgcgaatgatgatgatgtcatgttactagactgggtatatacatatatgagtttcccacttgtatagttcattatctgtgttacctctatttgtgttaattattcatttcgacaggtgaaagggttgttaaaagagaagaaattggaagcactagtagatgttgatcttcagggtaattacaaagacgaagaagtggagcagctaatccaagtggctttactctgcactcagagttcaccaatggaaagacccaaaatgtctgaagttgtaagaatgcttgaaggagatggtttagctgagagatgggaagagtggcaaaaggaggaaatgttcagacaagatttcaactacccaacccaccatccagccgtgtctggctggatcattggcgattccacttcccagatcgaaaacgaatacccctcgggtccacgttcggattataaggaccatgacggagactataaggaccatgacctcgacgctgcagcagcggattataaggacgatgacgataag

SEQ ID NO: 38 - protein, 1267 aa, Artificial Sequence
  Fusion protein
MSKALLHLHFLSLFLLCCVCHSSIFTLNFHFTGIVACRPHQIQAFTKFTNEFDTRGCNNSDTFNGVWCDNSTGAVAVLQLRKCLSGTLKSNSSLFGFHQLRYVDLQNNNLTSSSLPSGFGNLKRLEGLFLSSNGFLGQVPSSFSNLTMLAQLDLSYNKLTGSFPLVRGLRKLIVLDLSYNHFSGTLNPNSSLFELHQLRYLNLAFNNFSSSLPSKFGNLHRLENLILSSNGFSGQVPSTISNLTRLTKLYLDQNKLTSSFPLVQNLTNLYELDLSYNKFFGVIPSSLLTLPFLAHLALRENNLAGSVEVSNSSTSSRLEIMYLGSNHFEGQILEPISKLINLKHLDLSFLNTSYPIDLKLFSSLKSLRSLDLSGNSISSASLSSDSYIPLTLEMLTLRHCDINEFPNILKTLKELVYIDISNNRMKGKIPEWLWSLPLLQSVTLGNNYFTGFQGSAEILVNSSVLLLYLDSNNFEGALPDLPLSIKGFGVASNSFTSEIPLSICNRSSLAAIDLSYNNFTGPIPPCLRNLELVYLRNNNLEGSIPDALCDGASLRTLDVSHNRLTGKLPRSFVNCSSLKFLSVINNRIEDTFPFWLKALPNLQVLTLRSNRFYGPISPPHQGPLGFPELRIFEISDNKFTGSLPPNYFVNWKASSRTMNQDGGLYMVYEEKLFDEGGYGYTDALDLQYKGLHMEQAKALTSYAAIDFSGNRLEGQIPESIGLLKALIAVNISNNAFTGHIPLSMANLENLESLDMSRNQLSGTIPNGLGSISFLAYINVSHNQLTGEIPQGTQITGQSKSSFEGNAGLCGLPLKESCFGTGAPPMYHQKQEDKEEEEEEEEEEEEVLNGRAVAIGYGSGLLLGLAIAQVIASYRRKKPQDHFFDVPAEEDPEVHLGQLKRFSLRELQVASDNFSNKNILGRGGFGKVYKGRLADGTLVAVKRLKEERTQGGELQFQTEVEMISMAVHRNLLRLRGFCMTPTERLLVYPYMANGSVASCLRERPESQPPLDWPKRQRIALGSARGLAYLHDHCDPKIIHRDVKAANILLDEEFEAVVGDFGLAKLMDYKDTHVTTAVRGTIGHIAPEYLSTGKSSEKTDVFGYGVMLLELITGQRAFDLARLANDDDVMLLDWVKGLLKEKKLEALVDVDLQGNYKDEEVEQLIQVALLCTQSSPMERPKMSEVVRMLEGDGLAERWEEWQKEEMFRQDFNYPTHHPAVSGWIIGDSTSQIENEYPSGPRSDYKDHDGDYKDHDLDAAAADYKDDDDK

SEQ ID NO: 39 - DNA, 3615 bp, Artificial Sequence
  Encodes fusion protein
atgtcaaaggcgcttttgcatttgcattttctttctctgtttttactctgttgtgtctgccattcaagtatttttactttaaattttcattttactggtattgtggcctgtcgtccccaccagattcaagccttcacgaagttcacgaacgagtttgacacccgcggttgcaacaacagtgacacctttaatggagtctggtgcgataactcgacgggtgcggtcgcagtgctacaactaaggaagtgtctcagtggaactttgaagtccaacagtagcctcttcgggtttcatcaactccgttacgttgatctccaaaacaacaacttaacctcctcttcactcccttccgggtttggaaatctcaaaagattagagggcttgtttctttcctctaatggcttcctcggccaagttccttcctcattcagtaacctaacaatgcttgctcaattagacctttcttataacaagctcactggtagtttcccacttgtccggggtctaagaaagctcattgttttagacctttcatataatcacttctccggaactctgaatccaaacagtagcctctttgagttgcaccagctacgttaccttaatctcgcttttaacaactttagttcctcactcccttccaaatttggcaatctccatagattagagaacttgattctttcctctaatggcttttctggtcaagttccttccacaattagtaacctgacccggttaactaagttgtaccttgaccaaaacaagctcactagtagtttcccacttgtacagaatctaaccaacctctacgaattagacctttcatataataagttctttggagtcatcccttcttctctcctcactctgcctttcttagcacatcttgctctacgtgaaaacaatcttgctggttctgttgaagtttcaaactcctctacctcatctaggctcgaaatcatgtatctcgggtctaaccattttgaaggacaaatcctagagcctatctcaaagctcatcaacctcaagcatcttgacctttctttcctaaacacaagctacccaatagacttaaaactcttctcctccctcaaatctttgcggtcactggatctttctggaaacagtatatcttcggccagtttaagttcagattcatacatcccgttgaccctggaaatgttgaccttgaggcactgtgacatcaacgagttccccaacatcttaaagaccctcaaggagttggtgtatatagacatatccaacaacagaatgaaagggaagatccctgagtggttatggagcctacctcttctacagtcagtaactcttggaaataattatttcacaggtttccaaggttcggcggagattttagtaaattcatcagtgctgctattatatttggattcaaacaattttgaaggagcacttcctgatctaccactctctatcaaaggcttcggtgtggctagtaatagtttcacaagtgagatacctctttcaatctgcaaccgaagctctctcgctgctattgatctatcctacaacaacttcactggtcccattcctccatgtttgcgtaatttggaacttgtgtatctccggaacaacaacctggaaggaagtatccctgacgcgctctgtgatggtgcctctttacggacactcgatgttagccataaccgattaacagggaagcttccaaggtcttttgtaaactgctcatcgctaaagtttctaagcgttataaacaacagaattgaagatacgtttccgttctggctcaaagctttaccgaatttgcaagtccttactcttcgctcaaacagattttatggtcctatatctcctccgcatcaaggtcctctcgggtttccagagctgcggatatttgaaatatctgacaataagtttacaggaagcttgccaccaaactactttgtgaactggaaagcatcatcacgcacgatgaatcaagatgggggtttatatatggtatacgaggagaagctgttcgacgaaggcggctatggttatacagatgctttagatttgcaatacaaaggtctacacatggagcaagctaaggccctcacttcctacgccgccattgatttttctggaaatagactcgaaggacagattcctgaatctattggactcttgaaggcactgattgcagtcaatatatcaaacaacgccttcacaggccatattcccctgtctatggccaatcttgagaatctcgagtcactagacatgtcaagaaaccaactctcggggactattcctaatggactagggagcatttcgtttttggcgtacatcaacgtgtctcacaaccaactcacgggtgaaataccacaaggaacacagattactgggcaatctaaatcttccttcgaagggaatgcagggctttgtggtctacctctcaaggaaagttgcttcggcactggtgcacctccgatgtatcaccaaaagcaagaggacaaagaagaagaagaagaagaagaagaagaagaagaagaagtgttgaacgggagagcagtggcaatagggtatggatctggattattgcttggattggcaatagcacaagttattgcttcatacaaattgattattcaagcaataagaggatcagaaaaaccaccaggtccttccatattcagcccattgatcaagaaagctgaagatttagctttcttggagaatgaagaagcgttagcttctctggagatcataggaagaggaggttgtggagaagttttcaaagctgaactaccaggaagcaatgggaagatcatagctgtgaagaaagtgatccaaccgcctaaagacgccgatgaactaacagatgaagattccaagtttctgaacaagaaaatgaggcaaattagatccgagatcaacacagtcggccatatccggcaccggaatcttctcccattgttagcacacgtgtcaagacccgagtgccactacctcgtttacgagtacatggaaaaggggagtttgcaagatatattgactgacgtacaagctggaaatcaagaactaatgtggccagcgaggcacaagattgctttaggtatagctgcagggcttgagtaccttcacatggatcataacccacgaatcattcacagagacttaaagccagccaatgttcttcttgatgatgacatggaagccagaatttcagatttcggactggcaaaggcaatgccagatgcagtcacacatattacaacctcgcatgttgcaggtactgtgggatacatagcaccagagttttatcaaacccacaagttcacagataaatgtgatatctatagttttggagtgattcttgggattctggtgattgggaagcttccttcagatgagttttttcagcatactgacgagatgagtctgataaagtggatgaggaacataataacatcggaaaatcctagccttgcgattgatccgaagttgatggatcaaggattcgatgaacagatgcttctggttctgaagatcgcctgttactgtactttggatgatccaaaacagaggccgaacagtaaagatgtcaggaccatgttgtcccagatcaagcat

SEQ ID NO: 40 - protein, 1205 aa, Artificial Sequence
  Fusioin protein
MSKALLHLHFLSLFLLCCVCHSSIFTLNFHFTGIVACRPHQIQAFTKFTNEFDTRGCNNSDTFNGVWCDNSTGAVAVLQLRKCLSGTLKSNSSLFGFHQLRYVDLQNNNLTSSSLPSGFGNLKRLEGLFLSSNGFLGQVPSSFSNLTMLAQLDLSYNKLTGSFPLVRGLRKLIVLDLSYNHFSGTLNPNSSLFELHQLRYLNLAFNNFSSSLPSKFGNLHRLENLILSSNGFSGQVPSTISNLTRLTKLYLDQNKLTSSFPLVQNLTNLYELDLSYNKFFGVIPSSLLTLPFLAHLALRENNLAGSVEVSNSSTSSRLEIMYLGSNHFEGQILEPISKLINLKHLDLSFLNTSYPIDLKLFSSLKSLRSLDLSGNSISSASLSSDSYIPLTLEMLTLRHCDINEFPNILKTLKELVYIDISNNRMKGKIPEWLWSLPLLQSVTLGNNYFTGFQGSAEILVNSSVLLLYLDSNNFEGALPDLPLSIKGFGVASNSFTSEIPLSICNRSSLAAIDLSYNNFTGPIPPCLRNLELVYLRNNNLEGSIPDALCDGASLRTLDVSHNRLTGKLPRSFVNCSSLKFLSVINNRIEDTFPFWLKALPNLQVLTLRSNRFYGPISPPHQGPLGFPELRIFEISDNKFTGSLPPNYFVNWKASSRTMNQDGGLYMVYEEKLFDEGGYGYTDALDLQYKGLHMEQAKALTSYAAIDFSGNRLEGQIPESIGLLKALIAVNISNNAFTGHIPLSMANLENLESLDMSRNQLSGTIPNGLGSISFLAYINVSHNQLTGEIPQGTQITGQSKSSFEGNAGLCGLPLKESCFGTGAPPMYHQKQEDKEEEEEEEEEEEEVLNGRAVAIGYGSGLLLGLAIAQVIASYKLIIQAIRGSEKPPGPSIFSPLIKKAEDLAFLENEEALASLEIIGRGGCGEVFKAELPGSNGKIIAVKKVIQPPKDADELTDEDSKFLNKKMRQIRSEINTVGHIRHRNLLPLLAHVSRPECHYLVYEYMEKGSLQDILTDVQAGNQELMWPARHKIALGIAAGLEYLHMDHNPRIIHRDLKPANVLLDDDMEARISDFGLAKAMPDAVTHITTSHVAGTVGYIAPEFYQTHKFTDKCDIYSFGVILGILVIGKLPSDEFFQHTDEMSLIKWMRNIITSENPSLAIDPKLMDQGFDEQMLLVLKIACYCTLDDPKQRPNSKDVRTMLSQIKH

SEQ ID NO: 41 - DNA, 3699 bp, Artificial Sequence
  Encodes fusion protein
atgtcaaaggcgcttttgcatttgcattttctttctctgtttttactctgttgtgtctgccattcaagtatttttactttaaattttcattttactggtattgtggcctgtcgtccccaccagattcaagccttcacgaagttcacgaacgagtttgacacccgcggttgcaacaacagtgacacctttaatggagtctggtgcgataactcgacgggtgcggtcgcagtgctacaactaaggaagtgtctcagtggaactttgaagtccaacagtagcctcttcgggtttcatcaactccgttacgttgatctccaaaacaacaacttaacctcctcttcactcccttccgggtttggaaatctcaaaagattagagggcttgtttctttcctctaatggcttcctcggccaagttccttcctcattcagtaacctaacaatgcttgctcaattagacctttcttataacaagctcactggtagtttcccacttgtccggggtctaagaaagctcattgttttagacctttcatataatcacttctccggaactctgaatccaaacagtagcctctttgagttgcaccagctacgttaccttaatctcgcttttaacaactttagttcctcactcccttccaaatttggcaatctccatagattagagaacttgattctttcctctaatggcttttctggtcaagttccttccacaattagtaacctgacccggttaactaagttgtaccttgaccaaaacaagctcactagtagtttcccacttgtacagaatctaaccaacctctacgaattagacctttcatataataagttctttggagtcatcccttcttctctcctcactctgcctttcttagcacatcttgctctacgtgaaaacaatcttgctggttctgttgaagtttcaaactcctctacctcatctaggctcgaaatcatgtatctcgggtctaaccattttgaaggacaaatcctagagcctatctcaaagctcatcaacctcaagcatcttgacctttctttcctaaacacaagctacccaatagacttaaaactcttctcctccctcaaatctttgcggtcactggatctttctggaaacagtatatcttcggccagtttaagttcagattcatacatcccgttgaccctggaaatgttgaccttgaggcactgtgacatcaacgagttccccaacatcttaaagaccctcaaggagttggtgtatatagacatatccaacaacagaatgaaagggaagatccctgagtggttatggagcctacctcttctacagtcagtaactcttggaaataattatttcacaggtttccaaggttcggcggagattttagtaaattcatcagtgctgctattatatttggattcaaacaattttgaaggagcacttcctgatctaccactctctatcaaaggcttcggtgtggctagtaatagtttcacaagtgagatacctctttcaatctgcaaccgaagctctctcgctgctattgatctatcctacaacaacttcactggtcccattcctccatgtttgcgtaatttggaacttgtgtatctccggaacaacaacctggaaggaagtatccctgacgcgctctgtgatggtgcctctttacggacactcgatgttagccataaccgattaacagggaagcttccaaggtcttttgtaaactgctcatcgctaaagtttctaagcgttataaacaacagaattgaagatacgtttccgttctggctcaaagctttaccgaatttgcaagtccttactcttcgctcaaacagattttatggtcctatatctcctccgcatcaaggtcctctcgggtttccagagctgcggatatttgaaatatctgacaataagtttacaggaagcttgccaccaaactactttgtgaactggaaagcatcatcacgcacgatgaatcaagatgggggtttatatatggtatacgaggagaagctgttcgacgaaggcggctatggttatacagatgctttagatttgcaatacaaaggtctacacatggagcaagctaaggccctcacttcctacgccgccattgatttttctggaaatagactcgaaggacagattcctgaatctattggactcttgaaggcactgattgcagtcaatatatcaaacaacgccttcacaggccatattcccctgtctatggccaatcttgagaatctcgagtcactagacatgtcaagaaaccaactctcggggactattcctaatggactagggagcatttcgtttttggcgtacatcaacgtgtctcacaaccaactcacgggtgaaataccacaaggaacacagattactgggcaatctaaatcttccttcgaagggaatgcagggctttgtggtctacctctcaaggaaagttgcttcggcactggtgcacctccgatgtatcaccaaaagcaagaggacaaagaagaagaagaagaagaagaagaagaagaagaagaagtgttgaacgggagagcagtggcaatagggtatggatctggattattgcttggattggcaatagcacaagttattgcttcatacaaattgattattcaagcaataagaggatcagaaaaaccaccaggtccttccatattcagcccattgatcaagaaagctgaagatttagctttcttggagaatgaagaagcgttagcttctctggagatcataggaagaggaggttgtggagaagttttcaaagctgaactaccaggaagcaatgggaagatcatagctgtgaagaaagtgatccaaccgcctaaagacgccgatgaactaacagatgaagattccaagtttctgaacaagaaaatgaggcaaattagatccgagatcaacacagtcggccatatccggcaccggaatcttctcccattgttagcacacgtgtcaagacccgagtgccactacctcgtttacgagtacatggaaaaggggagtttgcaagatatattgactgacgtacaagctggaaatcaagaactaatgtggccagcgaggcacaagattgctttaggtatagctgcagggcttgagtaccttcacatggatcataacccacgaatcattcacagagacttaaagccagccaatgttcttcttgatgatgacatggaagccagaatttcagatttcggactggcaaaggcaatgccagatgcagtcacacatattacaacctcgcatgttgcaggtactgtgggatacatagcaccagagttttatcaaacccacaagttcacagataaatgtgatatctatagttttggagtgattcttgggattctggtgattgggaagcttccttcagatgagttttttcagcatactgacgagatgagtctgataaagtggatgaggaacataataacatcggaaaatcctagccttgcgattgatccgaagttgatggatcaaggattcgatgaacagatgcttctggttctgaagatcgcctgttactgtactttggatgatccaaaacagaggccgaacagtaaagatgtcaggaccatgttgtcccagatcaagcattcggattataaggaccatgacggagactataaggaccatgacctcgacgctgcagcagcggattataaggacgatgacgataag

SEQ ID NO: 42 - protein, 1233 aa, Artificial Sequence
  Fusion protein
MSKALLHLHFLSLFLLCCVCHSSIFTLNFHFTGIVACRPHQIQAFTKFTNEFDTRGCNNSDTFNGVWCDNSTGAVAVLQLRKCLSGTLKSNSSLFGFHQLRYVDLQNNNLTSSSLPSGFGNLKRLEGLFLSSNGFLGQVPSSFSNLTMLAQLDLSYNKLTGSFPLVRGLRKLIVLDLSYNHFSGTLNPNSSLFELHQLRYLNLAFNNFSSSLPSKFGNLHRLENLILSSNGFSGQVPSTISNLTRLTKLYLDQNKLTSSFPLVQNLTNLYELDLSYNKFFGVIPSSLLTLPFLAHLALRENNLAGSVEVSNSSTSSRLEIMYLGSNHFEGQILEPISKLINLKHLDLSFLNTSYPIDLKLFSSLKSLRSLDLSGNSISSASLSSDSYIPLTLEMLTLRHCDINEFPNILKTLKELVYIDISNNRMKGKIPEWLWSLPLLQSVTLGNNYFTGFQGSAEILVNSSVLLLYLDSNNFEGALPDLPLSIKGFGVASNSFTSEIPLSICNRSSLAAIDLSYNNFTGPIPPCLRNLELVYLRNNNLEGSIPDALCDGASLRTLDVSHNRLTGKLPRSFVNCSSLKFLSVINNRIEDTFPFWLKALPNLQVLTLRSNRFYGPISPPHQGPLGFPELRIFEISDNKFTGSLPPNYFVNWKASSRTMNQDGGLYMVYEEKLFDEGGYGYTDALDLQYKGLHMEQAKALTSYAAIDFSGNRLEGQIPESIGLLKALIAVNISNNAFTGHIPLSMANLENLESLDMSRNQLSGTIPNGLGSISFLAYINVSHNQLTGEIPQGTQITGQSKSSFEGNAGLCGLPLKESCFGTGAPPMYHQKQEDKEEEEEEEEEEEEVLNGRAVAIGYGSGLLLGLAIAQVIASYKLIIQAIRGSEKPPGPSIFSPLIKKAEDLAFLENEEALASLEIIGRGGCGEVFKAELPGSNGKIIAVKKVIQPPKDADELTDEDSKFLNKKMRQIRSEINTVGHIRHRNLLPLLAHVSRPECHYLVYEYMEKGSLQDILTDVQAGNQELMWPARHKIALGIAAGLEYLHMDHNPRIIHRDLKPANVLLDDDMEARISDFGLAKAMPDAVTHITTSHVAGTVGYIAPEFYQTHKFTDKCDIYSFGVILGILVIGKLPSDEFFQHTDEMSLIKWMRNIITSENPSLAIDPKLMDQGFDEQMLLVLKIACYCTLDDPKQRPNSKDVRTMLSQIKHSDYKDHDGDYKDHDLDAAAADYKDDDDK

SEQ ID NO: 43 - DNA, 2667 bp, Artificial Sequence
  Encodes synthetic protein
atgtcaaaggcgcttttgcatttgcattttctttctctgtttttactctgttgtgtctgccattcaagtatttttactttaaattttcattttactggtattgtggcctgtcgtccccaccagattcaagccttcacgaagttcacgaacgagtttgacacccgcggttgcaacaacagtgacacctttaatggagtctggtgcgataactcgacgggtgcggtcgcagtgctacaactaaggaagtgtctcagtggaactttgaagtccaacagtagcctcttcgggtttcatcaactccgttacgttgatctccaaaacaacaacttaacctcctcttcactcccttccgggtttggaaatctcaaaagattagagggcttgtttctttcctctaatggcttcctcggccaagttccttcctcattcagtaacctaacaatgcttgctcaattagacctttcttataacaagctcactggtagtttcccacttgtccggggtctaagaaagctcattgttttagacctttcatataatcacttctccggaactctgaatccaaacagtagcctctttgagttgcaccagctacgttaccttaatctcgcttttaacaactttagttcctcactcccttccaaatttggcaatctccatagattagagaacttgattctttcctctaatggcttttctggtcaagttccttccacaattagtaacctgacccggttaactaagttgtaccttgaccaaaacaagctcactagtagtttcccacttgtacagaatctaaccaacctctacgaattagacctttcatataataagttctttggagtcatcccttcttctctcctcactctgcctttcttagcacatcttgctctacgtgaaaacaatcttgctggttctgttgaagtttcaaactcctctacctcatctaggctcgaaatcatgtatctcgggtctaaccattttgaaggacaaatcctagagcctatctcaaagctcatcaacctcaagcatcttgacctttctttcctaaacacaagctacccaatagacttaaaactcttctcctccctcaaatctttgcggtcactggatctttctggaaacagtatatcttcggccagtttaagttcagattcatacatcccgttgaccctggaaatgttgaccttgaggcactgtgacatcaacgagttccccaacatcttaaagaccctcaaggagttggtgtatatagacatatccaacaacagaatgaaagggaagatccctgagtggttatggagcctacctcttctacagtcagtaactcttggaaataattatttcacaggtttccaaggttcggcggagattttagtaaattcatcagtgctgctattatatttggattcaaacaattttgaaggagcacttcctgatctaccactctctatcaaaggcttcggtgtggctagtaatagtttcacaagtgagatacctctttcaatctgcaaccgaagctctctcgctgctattgatctatcctacaacaacttcactggtcccattcctccatgtttgcgtaatttggaacttgtgtatctccggaacaacaacctggaaggaagtatccctgacgcgctctgtgatggtgcctctttacggacactcgatgttagccataaccgattaacagggaagcttccaaggtcttttgtaaactgctcatcgctaaagtttctaagcgttataaacaacagaattgaagatacgtttccgttctggctcaaagctttaccgaatttgcaagtccttactcttcgctcaaacagattttatggtcctatatctcctccgcatcaaggtcctctcgggtttccagagctgcggatatttgaaatatctgacaataagtttacaggaagcttgccaccaaactactttgtgaactggaaagcatcatcacgcacgatgaatcaagatgggggtttatatatggtatacgaggagaagctgttcgacgaaggcggctatggttatacagatgctttagatttgcaatacaaaggtctacacatggagcaagctaaggccctcacttcctacgccgccattgatttttctggaaatagactcgaaggacagattcctgaatctattggactcttgaaggcactgattgcagtcaatatatcaaacaacgccttcacaggccatattcccctgtctatggccaatcttgagaatctcgagtcactagacatgtcaagaaaccaactctcggggactattcctaatggactagggagcatttcgtttttggcgtacatcaacgtgtctcacaaccaactcacgggtgaaataccacaaggaacacagattactgggcaatctaaatcttccttcgaagggaatgcagggctttgtggtctacctctcaaggaaagttgcttcggcactggtgcacctccgatgtatcaccaaaagcaagaggacaaggaggaggaggaggccgaggaggacgagcaggaggtgctcaacggcagggccgtggcaatagggtatggatctggattattgcttggattggcaatagcacaagttattgcttcatacaaaccggagtggcttgtcaagataattggtctgaataaacgcagaaagcgt

SEQ ID NO: 44 - protein, 889 aa, Artificial Sequence
  Synthetic protein
MSKALLHLHFLSLFLLCCVCHSSIFTLNFHFTGIVACRPHQIQAFTKFTNEFDTRGCNNSDTFNGVWCDNSTGAVAVLQLRKCLSGTLKSNSSLFGFHQLRYVDLQNNNLTSSSLPSGFGNLKRLEGLFLSSNGFLGQVPSSFSNLTMLAQLDLSYNKLTGSFPLVRGLRKLIVLDLSYNHFSGTLNPNSSLFELHQLRYLNLAFNNFSSSLPSKFGNLHRLENLILSSNGFSGQVPSTISNLTRLTKLYLDQNKLTSSFPLVQNLTNLYELDLSYNKFFGVIPSSLLTLPFLAHLALRENNLAGSVEVSNSSTSSRLEIMYLGSNHFEGQILEPISKLINLKHLDLSFLNTSYPIDLKLFSSLKSLRSLDLSGNSISSASLSSDSYIPLTLEMLTLRHCDINEFPNILKTLKELVYIDISNNRMKGKIPEWLWSLPLLQSVTLGNNYFTGFQGSAEILVNSSVLLLYLDSNNFEGALPDLPLSIKGFGVASNSFTSEIPLSICNRSSLAAIDLSYNNFTGPIPPCLRNLELVYLRNNNLEGSIPDALCDGASLRTLDVSHNRLTGKLPRSFVNCSSLKFLSVINNRIEDTFPFWLKALPNLQVLTLRSNRFYGPISPPHQGPLGFPELRIFEISDNKFTGSLPPNYFVNWKASSRTMNQDGGLYMVYEEKLFDEGGYGYTDALDLQYKGLHMEQAKALTSYAAIDFSGNRLEGQIPESIGLLKALIAVNISNNAFTGHIPLSMANLENLESLDMSRNQLSGTIPNGLGSISFLAYINVSHNQLTGEIPQGTQITGQSKSSFEGNAGLCGLPLKESCFGTGAPPMYHQKQEDKEEEEAEEDEQEVLNGRAVAIGYGSGLLLGLAIAQVIASYKPEWLVKIIGLNKRRKR

SEQ ID NO: 45 - DNA, 2751 bp, Artificial Sequence
  Encodes fusion protein
atgtcaaaggcgcttttgcatttgcattttctttctctgtttttactctgttgtgtctgccattcaagtatttttactttaaattttcattttactggtattgtggcctgtcgtccccaccagattcaagccttcacgaagttcacgaacgagtttgacacccgcggttgcaacaacagtgacacctttaatggagtctggtgcgataactcgacgggtgcggtcgcagtgctacaactaaggaagtgtctcagtggaactttgaagtccaacagtagcctcttcgggtttcatcaactccgttacgttgatctccaaaacaacaacttaacctcctcttcactcccttccgggtttggaaatctcaaaagattagagggcttgtttctttcctctaatggcttcctcggccaagttccttcctcattcagtaacctaacaatgcttgctcaattagacctttcttataacaagctcactggtagtttcccacttgtccggggtctaagaaagctcattgttttagacctttcatataatcacttctccggaactctgaatccaaacagtagcctctttgagttgcaccagctacgttaccttaatctcgcttttaacaactttagttcctcactcccttccaaatttggcaatctccatagattagagaacttgattctttcctctaatggcttttctggtcaagttccttccacaattagtaacctgacccggttaactaagttgtaccttgaccaaaacaagctcactagtagtttcccacttgtacagaatctaaccaacctctacgaattagacctttcatataataagttctttggagtcatcccttcttctctcctcactctgcctttcttagcacatcttgctctacgtgaaaacaatcttgctggttctgttgaagtttcaaactcctctacctcatctaggctcgaaatcatgtatctcgggtctaaccattttgaaggacaaatcctagagcctatctcaaagctcatcaacctcaagcatcttgacctttctttcctaaacacaagctacccaatagacttaaaactcttctcctccctcaaatctttgcggtcactggatctttctggaaacagtatatcttcggccagtttaagttcagattcatacatcccgttgaccctggaaatgttgaccttgaggcactgtgacatcaacgagttccccaacatcttaaagaccctcaaggagttggtgtatatagacatatccaacaacagaatgaaagggaagatccctgagtggttatggagcctacctcttctacagtcagtaactcttggaaataattatttcacaggtttccaaggttcggcggagattttagtaaattcatcagtgctgctattatatttggattcaaacaattttgaaggagcacttcctgatctaccactctctatcaaaggcttcggtgtggctagtaatagtttcacaagtgagatacctctttcaatctgcaaccgaagctctctcgctgctattgatctatcctacaacaacttcactggtcccattcctccatgtttgcgtaatttggaacttgtgtatctccggaacaacaacctggaaggaagtatccctgacgcgctctgtgatggtgcctctttacggacactcgatgttagccataaccgattaacagggaagcttccaaggtcttttgtaaactgctcatcgctaaagtttctaagcgttataaacaacagaattgaagatacgtttccgttctggctcaaagctttaccgaatttgcaagtccttactcttcgctcaaacagattttatggtcctatatctcctccgcatcaaggtcctctcgggtttccagagctgcggatatttgaaatatctgacaataagtttacaggaagcttgccaccaaactactttgtgaactggaaagcatcatcacgcacgatgaatcaagatgggggtttatatatggtatacgaggagaagctgttcgacgaaggcggctatggttatacagatgctttagatttgcaatacaaaggtctacacatggagcaagctaaggccctcacttcctacgccgccattgatttttctggaaatagactcgaaggacagattcctgaatctattggactcttgaaggcactgattgcagtcaatatatcaaacaacgccttcacaggccatattcccctgtctatggccaatcttgagaatctcgagtcactagacatgtcaagaaaccaactctcggggactattcctaatggactagggagcatttcgtttttggcgtacatcaacgtgtctcacaaccaactcacgggtgaaataccacaaggaacacagattactgggcaatctaaatcttccttcgaagggaatgcagggctttgtggtctacctctcaaggaaagttgcttcggcactggtgcacctccgatgtatcaccaaaagcaagaggacaaggaggaggaggaggccgaggaggacgagcaggaggtgctcaacggcagggccgtggcaatagggtatggatctggattattgcttggattggcaatagcacaagttattgcttcatacaaaccggagtggcttgtcaagataattggtctgaataaacgcagaaagcgttcggattataaggaccatgacggagactataaggaccatgacctcgacgctgcagcagcggattataaggacgatgacgataag

SEQ ID NO: 46 - protein, 917 aa, Artificial Sequence
  Fusion protein
MSKALLHLHFLSLFLLCCVCHSSIFTLNFHFTGIVACRPHQIQAFTKFTNEFDTRGCNNSDTFNGVWCDNSTGAVAVLQLRKCLSGTLKSNSSLFGFHQLRYVDLQNNNLTSSSLPSGFGNLKRLEGLFLSSNGFLGQVPSSFSNLTMLAQLDLSYNKLTGSFPLVRGLRKLIVLDLSYNHFSGTLNPNSSLFELHQLRYLNLAFNNFSSSLPSKFGNLHRLENLILSSNGFSGQVPSTISNLTRLTKLYLDQNKLTSSFPLVQNLTNLYELDLSYNKFFGVIPSSLLTLPFLAHLALRENNLAGSVEVSNSSTSSRLEIMYLGSNHFEGQILEPISKLINLKHLDLSFLNTSYPIDLKLFSSLKSLRSLDLSGNSISSASLSSDSYIPLTLEMLTLRHCDINEFPNILKTLKELVYIDISNNRMKGKIPEWLWSLPLLQSVTLGNNYFTGFQGSAEILVNSSVLLLYLDSNNFEGALPDLPLSIKGFGVASNSFTSEIPLSICNRSSLAAIDLSYNNFTGPIPPCLRNLELVYLRNNNLEGSIPDALCDGASLRTLDVSHNRLTGKLPRSFVNCSSLKFLSVINNRIEDTFPFWLKALPNLQVLTLRSNRFYGPISPPHQGPLGFPELRIFEISDNKFTGSLPPNYFVNWKASSRTMNQDGGLYMVYEEKLFDEGGYGYTDALDLQYKGLHMEQAKALTSYAAIDFSGNRLEGQIPESIGLLKALIAVNISNNAFTGHIPLSMANLENLESLDMSRNQLSGTIPNGLGSISFLAYINVSHNQLTGEIPQGTQITGQSKSSFEGNAGLCGLPLKESCFGTGAPPMYHQKQEDKEEEEAEEDEQEVLNGRAVAIGYGSGLLLGLAIAQVIASYKPEWLVKIIGLNKRRKRSDYKDHDGDYKDHDLDAAAADYKDDDDK

SEQ ID NO: 47 - DNA, 2664 bp, Artificial Sequence
  Encodes fusion protein
atgtcaaaggcgcttttgcatttgcattttctttctctgtttttactctgttgtgtctgccattcaagtatttttactttaaattttcattttactggtattgtggcctgtcgtccccaccagattcaagccttcacgaagttcacgaacgagtttgacacccgcggttgcaacaacagtgacacctttaatggagtctggtgcgataactcgacgggtgcggtcgcagtgctacaactaaggaagtgtctcagtggaactttgaagtccaacagtagcctcttcgggtttcatcaactccgttacgttgatctccaaaacaacaacttaacctcctcttcactcccttccgggtttggaaatctcaaaagattagagggcttgtttctttcctctaatggcttcctcggccaagttccttcctcattcagtaacctaacaatgcttgctcaattagacctttcttataacaagctcactggtagtttcccacttgtccggggtctaagaaagctcattgttttagacctttcatataatcacttctccggaactctgaatccaaacagtagcctctttgagttgcaccagctacgttaccttaatctcgcttttaacaactttagttcctcactcccttccaaatttggcaatctccatagattagagaacttgattctttcctctaatggcttttctggtcaagttccttccacaattagtaacctgacccggttaactaagttgtaccttgaccaaaacaagctcactagtagtttcccacttgtacagaatctaaccaacctctacgaattagacctttcatataataagttctttggagtcatcccttcttctctcctcactctgcctttcttagcacatcttgctctacgtgaaaacaatcttgctggttctgttgaagtttcaaactcctctacctcatctaggctcgaaatcatgtatctcgggtctaaccattttgaaggacaaatcctagagcctatctcaaagctcatcaacctcaagcatcttgacctttctttcctaaacacaagctacccaatagacttaaaactcttctcctccctcaaatctttgcggtcactggatctttctggaaacagtatatcttcggccagtttaagttcagattcatacatcccgttgaccctggaaatgttgaccttgaggcactgtgacatcaacgagttccccaacatcttaaagaccctcaaggagttggtgtatatagacatatccaacaacagaatgaaagggaagatccctgagtggttatggagcctacctcttctacagtcagtaactcttggaaataattatttcacaggtttccaaggttcggcggagattttagtaaattcatcagtgctgctattatatttggattcaaacaattttgaaggagcacttcctgatctaccactctctatcaaaggcttcggtgtggctagtaatagtttcacaagtgagatacctctttcaatctgcaaccgaagctctctcgctgctattgatctatcctacaacaacttcactggtcccattcctccatgtttgcgtaatttggaacttgtgtatctccggaacaacaacctggaaggaagtatccctgacgcgctctgtgatggtgcctctttacggacactcgatgttagccataaccgattaacagggaagcttccaaggtcttttgtaaactgctcatcgctaaagtttctaagcgttataaacaacagaattgaagatacgtttccgttctggctcaaagctttaccgaatttgcaagtccttactcttcgctcaaacagattttatggtcctatatctcctccgcatcaaggtcctctcgggtttccagagctgcggatatttgaaatatctgacaataagtttacaggaagcttgccaccaaactactttgtgaactggaaagcatcatcacgcacgatgaatcaagatgggggtttatatatggtatacgaggagaagctgttcgacgaaggcggctatggttatacagatgctttagatttgcaatacaaaggtctacacatggagcaagctaaggccctcacttcctacgccgccattgatttttctggaaatagactcgaaggacagattcctgaatctattggactcttgaaggcactgattgcagtcaatatatcaaacaacgccttcacaggccatattcccctgtctatggccaatcttgagaatctcgagtcactagacatgtcaagaaaccaactctcggggactattcctaatggactagggagcatttcgtttttggcgtacatcaacgtgtctcacaaccaactcacgggtgaaataccacaaggaacacagattactgggcaatctaaatcttccttcgaagggaatgcagggctttgtggtctacctctcaaggaaagttgcttcggcactggtgcacctccgatgtatcaccaaaagcaagaggacacccacgccaaggaggaggagaacgaggaggagggcaacgtgatcgacgccgtggcaatagggtatggatctggattattgcttggattggcaatagcacaagttattgcttcatacaaaccggagtggcttgtcaagataattggtctgaataaacgcagaaagcgt

SEQ ID NO: 48 - protein, 888 aa, Artificial Sequence
  Fusioin protein
MSKALLHLHFLSLFLLCCVCHSSIFTLNFHFTGIVACRPHQIQAFTKFTNEFDTRGCNNSDTFNGVWCDNSTGAVAVLQLRKCLSGTLKSNSSLFGFHQLRYVDLQNNNLTSSSLPSGFGNLKRLEGLFLSSNGFLGQVPSSFSNLTMLAQLDLSYNKLTGSFPLVRGLRKLIVLDLSYNHFSGTLNPNSSLFELHQLRYLNLAFNNFSSSLPSKFGNLHRLENLILSSNGFSGQVPSTISNLTRLTKLYLDQNKLTSSFPLVQNLTNLYELDLSYNKFFGVIPSSLLTLPFLAHLALRENNLAGSVEVSNSSTSSRLEIMYLGSNHFEGQILEPISKLINLKHLDLSFLNTSYPIDLKLFSSLKSLRSLDLSGNSISSASLSSDSYIPLTLEMLTLRHCDINEFPNILKTLKELVYIDISNNRMKGKIPEWLWSLPLLQSVTLGNNYFTGFQGSAEILVNSSVLLLYLDSNNFEGALPDLPLSIKGFGVASNSFTSEIPLSICNRSSLAAIDLSYNNFTGPIPPCLRNLELVYLRNNNLEGSIPDALCDGASLRTLDVSHNRLTGKLPRSFVNCSSLKFLSVINNRIEDTFPFWLKALPNLQVLTLRSNRFYGPISPPHQGPLGFPELRIFEISDNKFTGSLPPNYFVNWKASSRTMNQDGGLYMVYEEKLFDEGGYGYTDALDLQYKGLHMEQAKALTSYAAIDFSGNRLEGQIPESIGLLKALIAVNISNNAFTGHIPLSMANLENLESLDMSRNQLSGTIPNGLGSISFLAYINVSHNQLTGEIPQGTQITGQSKSSFEGNAGLCGLPLKESCFGTGAPPMYHQKQEDTHAKEEENEEEGNVIDAVAIGYGSGLLLGLAIAQVIASYKPEWLVKIIGLNKRRKR

SEQ ID NO: 49 - DNA, 2748 bp, Artificial Sequence
  Encodes fusion protein
atgtcaaaggcgcttttgcatttgcattttctttctctgtttttactctgttgtgtctgccattcaagtatttttactttaaattttcattttactggtattgtggcctgtcgtccccaccagattcaagccttcacgaagttcacgaacgagtttgacacccgcggttgcaacaacagtgacacctttaatggagtctggtgcgataactcgacgggtgcggtcgcagtgctacaactaaggaagtgtctcagtggaactttgaagtccaacagtagcctcttcgggtttcatcaactccgttacgttgatctccaaaacaacaacttaacctcctcttcactcccttccgggtttggaaatctcaaaagattagagggcttgtttctttcctctaatggcttcctcggccaagttccttcctcattcagtaacctaacaatgcttgctcaattagacctttcttataacaagctcactggtagtttcccacttgtccggggtctaagaaagctcattgttttagacctttcatataatcacttctccggaactctgaatccaaacagtagcctctttgagttgcaccagctacgttaccttaatctcgcttttaacaactttagttcctcactcccttccaaatttggcaatctccatagattagagaacttgattctttcctctaatggcttttctggtcaagttccttccacaattagtaacctgacccggttaactaagttgtaccttgaccaaaacaagctcactagtagtttcccacttgtacagaatctaaccaacctctacgaattagacctttcatataataagttctttggagtcatcccttcttctctcctcactctgcctttcttagcacatcttgctctacgtgaaaacaatcttgctggttctgttgaagtttcaaactcctctacctcatctaggctcgaaatcatgtatctcgggtctaaccattttgaaggacaaatcctagagcctatctcaaagctcatcaacctcaagcatcttgacctttctttcctaaacacaagctacccaatagacttaaaactcttctcctccctcaaatctttgcggtcactggatctttctggaaacagtatatcttcggccagtttaagttcagattcatacatcccgttgaccctggaaatgttgaccttgaggcactgtgacatcaacgagttccccaacatcttaaagaccctcaaggagttggtgtatatagacatatccaacaacagaatgaaagggaagatccctgagtggttatggagcctacctcttctacagtcagtaactcttggaaataattatttcacaggtttccaaggttcggcggagattttagtaaattcatcagtgctgctattatatttggattcaaacaattttgaaggagcacttcctgatctaccactctctatcaaaggcttcggtgtggctagtaatagtttcacaagtgagatacctctttcaatctgcaaccgaagctctctcgctgctattgatctatcctacaacaacttcactggtcccattcctccatgtttgcgtaatttggaacttgtgtatctccggaacaacaacctggaaggaagtatccctgacgcgctctgtgatggtgcctctttacggacactcgatgttagccataaccgattaacagggaagcttccaaggtcttttgtaaactgctcatcgctaaagtttctaagcgttataaacaacagaattgaagatacgtttccgttctggctcaaagctttaccgaatttgcaagtccttactcttcgctcaaacagattttatggtcctatatctcctccgcatcaaggtcctctcgggtttccagagctgcggatatttgaaatatctgacaataagtttacaggaagcttgccaccaaactactttgtgaactggaaagcatcatcacgcacgatgaatcaagatgggggtttatatatggtatacgaggagaagctgttcgacgaaggcggctatggttatacagatgctttagatttgcaatacaaaggtctacacatggagcaagctaaggccctcacttcctacgccgccattgatttttctggaaatagactcgaaggacagattcctgaatctattggactcttgaaggcactgattgcagtcaatatatcaaacaacgccttcacaggccatattcccctgtctatggccaatcttgagaatctcgagtcactagacatgtcaagaaaccaactctcggggactattcctaatggactagggagcatttcgtttttggcgtacatcaacgtgtctcacaaccaactcacgggtgaaataccacaaggaacacagattactgggcaatctaaatcttccttcgaagggaatgcagggctttgtggtctacctctcaaggaaagttgcttcggcactggtgcacctccgatgtatcaccaaaagcaagaggacacccacgccaaggaggaggagaacgaggaggagggcaacgtgatcgacgccgtggcaatagggtatggatctggattattgcttggattggcaatagcacaagttattgcttcatacaaaccggagtggcttgtcaagataattggtctgaataaacgcagaaagcgttcggattataaggaccatgacggagactataaggaccatgacctcgacgctgcagcagcggattataaggacgatgacgataag

SEQ ID NO: 50 - protein, 916 aa, Artificial Sequence
  Fusion protein
MSKALLHLHFLSLFLLCCVCHSSIFTLNFHFTGIVACRPHQIQAFTKFTNEFDTRGCNNSDTFNGVWCDNSTGAVAVLQLRKCLSGTLKSNSSLFGFHQLRYVDLQNNNLTSSSLPSGFGNLKRLEGLFLSSNGFLGQVPSSFSNLTMLAQLDLSYNKLTGSFPLVRGLRKLIVLDLSYNHFSGTLNPNSSLFELHQLRYLNLAFNNFSSSLPSKFGNLHRLENLILSSNGFSGQVPSTISNLTRLTKLYLDQNKLTSSFPLVQNLTNLYELDLSYNKFFGVIPSSLLTLPFLAHLALRENNLAGSVEVSNSSTSSRLEIMYLGSNHFEGQILEPISKLINLKHLDLSFLNTSYPIDLKLFSSLKSLRSLDLSGNSISSASLSSDSYIPLTLEMLTLRHCDINEFPNILKTLKELVYIDISNNRMKGKIPEWLWSLPLLQSVTLGNNYFTGFQGSAEILVNSSVLLLYLDSNNFEGALPDLPLSIKGFGVASNSFTSEIPLSICNRSSLAAIDLSYNNFTGPIPPCLRNLELVYLRNNNLEGSIPDALCDGASLRTLDVSHNRLTGKLPRSFVNCSSLKFLSVINNRIEDTFPFWLKALPNLQVLTLRSNRFYGPISPPHQGPLGFPELRIFEISDNKFTGSLPPNYFVNWKASSRTMNQDGGLYMVYEEKLFDEGGYGYTDALDLQYKGLHMEQAKALTSYAAIDFSGNRLEGQIPESIGLLKALIAVNISNNAFTGHIPLSMANLENLESLDMSRNQLSGTIPNGLGSISFLAYINVSHNQLTGEIPQGTQITGQSKSSFEGNAGLCGLPLKESCFGTGAPPMYHQKQEDTHAKEEENEEEGNVIDAVAIGYGSGLLLGLAIAQVIASYKPEWLVKIIGLNKRRKRSDYKDHDGDYKDHDLDAAAADYKDDDDK

SEQ ID NO: 51 - DNA, 2667 bp, Artificial Sequence
  Encodes fusion protein
atgtcaaaggcgcttttgcatttgcattttctttctctgtttttactctgttgtgtctgccattcaagtatttttactttaaattttcattttactggtattgtggcctgtcgtccccaccagattcaagccttcacgaagttcacgaacgagtttgacacccgcggttgcaacaacagtgacacctttaatggagtctggtgcgataactcgacgggtgcggtcgcagtgctacaactaaggaagtgtctcagtggaactttgaagtccaacagtagcctcttcgggtttcatcaactccgttacgttgatctccaaaacaacaacttaacctcctcttcactcccttccgggtttggaaatctcaaaagattagagggcttgtttctttcctctaatggcttcctcggccaagttccttcctcattcagtaacctaacaatgcttgctcaattagacctttcttataacaagctcactggtagtttcccacttgtccggggtctaagaaagctcattgttttagacctttcatataatcacttctccggaactctgaatccaaacagtagcctctttgagttgcaccagctacgttaccttaatctcgcttttaacaactttagttcctcactcccttccaaatttggcaatctccatagattagagaacttgattctttcctctaatggcttttctggtcaagttccttccacaattagtaacctgacccggttaactaagttgtaccttgaccaaaacaagctcactagtagtttcccacttgtacagaatctaaccaacctctacgaattagacctttcatataataagttctttggagtcatcccttcttctctcctcactctgcctttcttagcacatcttgctctacgtgaaaacaatcttgctggttctgttgaagtttcaaactcctctacctcatctaggctcgaaatcatgtatctcgggtctaaccattttgaaggacaaatcctagagcctatctcaaagctcatcaacctcaagcatcttgacctttctttcctaaacacaagctacccaatagacttaaaactcttctcctccctcaaatctttgcggtcactggatctttctggaaacagtatatcttcggccagtttaagttcagattcatacatcccgttgaccctggaaatgttgaccttgaggcactgtgacatcaacgagttccccaacatcttaaagaccctcaaggagttggtgtatatagacatatccaacaacagaatgaaagggaagatccctgagtggttatggagcctacctcttctacagtcagtaactcttggaaataattatttcacaggtttccaaggttcggcggagattttagtaaattcatcagtgctgctattatatttggattcaaacaattttgaaggagcacttcctgatctaccactctctatcaaaggcttcggtgtggctagtaatagtttcacaagtgagatacctctttcaatctgcaaccgaagctctctcgctgctattgatctatcctacaacaacttcactggtcccattcctccatgtttgcgtaatttggaacttgtgtatctccggaacaacaacctggaaggaagtatccctgacgcgctctgtgatggtgcctctttacggacactcgatgttagccataaccgattaacagggaagcttccaaggtcttttgtaaactgctcatcgctaaagtttctaagcgttataaacaacagaattgaagatacgtttccgttctggctcaaagctttaccgaatttgcaagtccttactcttcgctcaaacagattttatggtcctatatctcctccgcatcaaggtcctctcgggtttccagagctgcggatatttgaaatatctgacaataagtttacaggaagcttgccaccaaactactttgtgaactggaaagcatcatcacgcacgatgaatcaagatgggggtttatatatggtatacgaggagaagctgttcgacgaaggcggctatggttatacagatgctttagatttgcaatacaaaggtctacacatggagcaagctaaggccctcacttcctacgccgccattgatttttctggaaatagactcgaaggacagattcctgaatctattggactcttgaaggcactgattgcagtcaatatatcaaacaacgccttcacaggccatattcccctgtctatggccaatcttgagaatctcgagtcactagacatgtcaagaaaccaactctcggggactattcctaatggactagggagcatttcgtttttggcgtacatcaacgtgtctcacaaccaactcacgggtgaaataccacaaggaacacagattactgggcaatctaaatcttccttcgaagggaatgcagggctttgtggtctacctctcaaggaaagttgcttcggcactggtgcacctccgatgtatcaccaaaagcaagaggacgagagcctcccgccgccgaccccgctcccggacagcgacgacgagtgggaggccgtggcaatagggtatggatctggattattgcttggattggcaatagcacaagttattgcttcatacaaaccggagtggcttgtcaagataattggtctgaataaacgcagaaagcgt

SEQ ID NO: 52 - protein, 889 aa, Artificial Sequence
  Fusion protein
MSKALLHLHFLSLFLLCCVCHSSIFTLNFHFTGIVACRPHQIQAFTKFTNEFDTRGCNNSDTFNGVWCDNSTGAVAVLQLRKCLSGTLKSNSSLFGFHQLRYVDLQNNNLTSSSLPSGFGNLKRLEGLFLSSNGFLGQVPSSFSNLTMLAQLDLSYNKLTGSFPLVRGLRKLIVLDLSYNHFSGTLNPNSSLFELHQLRYLNLAFNNFSSSLPSKFGNLHRLENLILSSNGFSGQVPSTISNLTRLTKLYLDQNKLTSSFPLVQNLTNLYELDLSYNKFFGVIPSSLLTLPFLAHLALRENNLAGSVEVSNSSTSSRLEIMYLGSNHFEGQILEPISKLINLKHLDLSFLNTSYPIDLKLFSSLKSLRSLDLSGNSISSASLSSDSYIPLTLEMLTLRHCDINEFPNILKTLKELVYIDISNNRMKGKIPEWLWSLPLLQSVTLGNNYFTGFQGSAEILVNSSVLLLYLDSNNFEGALPDLPLSIKGFGVASNSFTSEIPLSICNRSSLAAIDLSYNNFTGPIPPCLRNLELVYLRNNNLEGSIPDALCDGASLRTLDVSHNRLTGKLPRSFVNCSSLKFLSVINNRIEDTFPFWLKALPNLQVLTLRSNRFYGPISPPHQGPLGFPELRIFEISDNKFTGSLPPNYFVNWKASSRTMNQDGGLYMVYEEKLFDEGGYGYTDALDLQYKGLHMEQAKALTSYAAIDFSGNRLEGQIPESIGLLKALIAVNISNNAFTGHIPLSMANLENLESLDMSRNQLSGTIPNGLGSISFLAYINVSHNQLTGEIPQGTQITGQSKSSFEGNAGLCGLPLKESCFGTGAPPMYHQKQEDESLPPPTPLPDSDDEWEAVAIGYGSGLLLGLAIAQVIASYKPEWLVKIIGLNKRRKR

SEQ ID NO: 53 - DNA, 2751 bp, Artificial Sequence
  Encodes fusion protein
atgtcaaaggcgcttttgcatttgcattttctttctctgtttttactctgttgtgtctgccattcaagtatttttactttaaattttcattttactggtattgtggcctgtcgtccccaccagattcaagccttcacgaagttcacgaacgagtttgacacccgcggttgcaacaacagtgacacctttaatggagtctggtgcgataactcgacgggtgcggtcgcagtgctacaactaaggaagtgtctcagtggaactttgaagtccaacagtagcctcttcgggtttcatcaactccgttacgttgatctccaaaacaacaacttaacctcctcttcactcccttccgggtttggaaatctcaaaagattagagggcttgtttctttcctctaatggcttcctcggccaagttccttcctcattcagtaacctaacaatgcttgctcaattagacctttcttataacaagctcactggtagtttcccacttgtccggggtctaagaaagctcattgttttagacctttcatataatcacttctccggaactctgaatccaaacagtagcctctttgagttgcaccagctacgttaccttaatctcgcttttaacaactttagttcctcactcccttccaaatttggcaatctccatagattagagaacttgattctttcctctaatggcttttctggtcaagttccttccacaattagtaacctgacccggttaactaagttgtaccttgaccaaaacaagctcactagtagtttcccacttgtacagaatctaaccaacctctacgaattagacctttcatataataagttctttggagtcatcccttcttctctcctcactctgcctttcttagcacatcttgctctacgtgaaaacaatcttgctggttctgttgaagtttcaaactcctctacctcatctaggctcgaaatcatgtatctcgggtctaaccattttgaaggacaaatcctagagcctatctcaaagctcatcaacctcaagcatcttgacctttctttcctaaacacaagctacccaatagacttaaaactcttctcctccctcaaatctttgcggtcactggatctttctggaaacagtatatcttcggccagtttaagttcagattcatacatcccgttgaccctggaaatgttgaccttgaggcactgtgacatcaacgagttccccaacatcttaaagaccctcaaggagttggtgtatatagacatatccaacaacagaatgaaagggaagatccctgagtggttatggagcctacctcttctacagtcagtaactcttggaaataattatttcacaggtttccaaggttcggcggagattttagtaaattcatcagtgctgctattatatttggattcaaacaattttgaaggagcacttcctgatctaccactctctatcaaaggcttcggtgtggctagtaatagtttcacaagtgagatacctctttcaatctgcaaccgaagctctctcgctgctattgatctatcctacaacaacttcactggtcccattcctccatgtttgcgtaatttggaacttgtgtatctccggaacaacaacctggaaggaagtatccctgacgcgctctgtgatggtgcctctttacggacactcgatgttagccataaccgattaacagggaagcttccaaggtcttttgtaaactgctcatcgctaaagtttctaagcgttataaacaacagaattgaagatacgtttccgttctggctcaaagctttaccgaatttgcaagtccttactcttcgctcaaacagattttatggtcctatatctcctccgcatcaaggtcctctcgggtttccagagctgcggatatttgaaatatctgacaataagtttacaggaagcttgccaccaaactactttgtgaactggaaagcatcatcacgcacgatgaatcaagatgggggtttatatatggtatacgaggagaagctgttcgacgaaggcggctatggttatacagatgctttagatttgcaatacaaaggtctacacatggagcaagctaaggccctcacttcctacgccgccattgatttttctggaaatagactcgaaggacagattcctgaatctattggactcttgaaggcactgattgcagtcaatatatcaaacaacgccttcacaggccatattcccctgtctatggccaatcttgagaatctcgagtcactagacatgtcaagaaaccaactctcggggactattcctaatggactagggagcatttcgtttttggcgtacatcaacgtgtctcacaaccaactcacgggtgaaataccacaaggaacacagattactgggcaatctaaatcttccttcgaagggaatgcagggctttgtggtctacctctcaaggaaagttgcttcggcactggtgcacctccgatgtatcaccaaaagcaagaggacgagagcctcccgccgccgaccccgctcccggacagcgacgacgagtgggaggccgtggcaatagggtatggatctggattattgcttggattggcaatagcacaagttattgcttcatacaaaccggagtggcttgtcaagataattggtctgaataaacgcagaaagcgttcggattataaggaccatgacggagactataaggaccatgacctcgacgctgcagcagcggattataaggacgatgacgataag

SEQ ID NO: 54 - protein, 917 aa, Artificial Sequence
  Fusion protein
MSKALLHLHFLSLFLLCCVCHSSIFTLNFHFTGIVACRPHQIQAFTKFTNEFDTRGCNNSDTFNGVWCDNSTGAVAVLQLRKCLSGTLKSNSSLFGFHQLRYVDLQNNNLTSSSLPSGFGNLKRLEGLFLSSNGFLGQVPSSFSNLTMLAQLDLSYNKLTGSFPLVRGLRKLIVLDLSYNHFSGTLNPNSSLFELHQLRYLNLAFNNFSSSLPSKFGNLHRLENLILSSNGFSGQVPSTISNLTRLTKLYLDQNKLTSSFPLVQNLTNLYELDLSYNKFFGVIPSSLLTLPFLAHLALRENNLAGSVEVSNSSTSSRLEIMYLGSNHFEGQILEPISKLINLKHLDLSFLNTSYPIDLKLFSSLKSLRSLDLSGNSISSASLSSDSYIPLTLEMLTLRHCDINEFPNILKTLKELVYIDISNNRMKGKIPEWLWSLPLLQSVTLGNNYFTGFQGSAEILVNSSVLLLYLDSNNFEGALPDLPLSIKGFGVASNSFTSEIPLSICNRSSLAAIDLSYNNFTGPIPPCLRNLELVYLRNNNLEGSIPDALCDGASLRTLDVSHNRLTGKLPRSFVNCSSLKFLSVINNRIEDTFPFWLKALPNLQVLTLRSNRFYGPISPPHQGPLGFPELRIFEISDNKFTGSLPPNYFVNWKASSRTMNQDGGLYMVYEEKLFDEGGYGYTDALDLQYKGLHMEQAKALTSYAAIDFSGNRLEGQIPESIGLLKALIAVNISNNAFTGHIPLSMANLENLESLDMSRNQLSGTIPNGLGSISFLAYINVSHNQLTGEIPQGTQITGQSKSSFEGNAGLCGLPLKESCFGTGAPPMYHQKQEDESLPPPTPLPDSDDEWEAVAIGYGSGLLLGLAIAQVIASYKPEWLVKIIGLNKRRKRSDYKDHDGDYKDHDLDAAAADYKDDDDK

SEQ ID NO: 55 - DNA, 2664 bp, Artificial Sequence
  Encodes fusion protein
atgtcaaaggcgcttttgcatttgcattttctttctctgtttttactctgttgtgtctgccattcaagtatttttactttaaattttcattttactggtattgtggcctgtcgtccccaccagattcaagccttcacgaagttcacgaacgagtttgacacccgcggttgcaacaacagtgacacctttaatggagtctggtgcgataactcgacgggtgcggtcgcagtgctacaactaaggaagtgtctcagtggaactttgaagtccaacagtagcctcttcgggtttcatcaactccgttacgttgatctccaaaacaacaacttaacctcctcttcactcccttccgggtttggaaatctcaaaagattagagggcttgtttctttcctctaatggcttcctcggccaagttccttcctcattcagtaacctaacaatgcttgctcaattagacctttcttataacaagctcactggtagtttcccacttgtccggggtctaagaaagctcattgttttagacctttcatataatcacttctccggaactctgaatccaaacagtagcctctttgagttgcaccagctacgttaccttaatctcgcttttaacaactttagttcctcactcccttccaaatttggcaatctccatagattagagaacttgattctttcctctaatggcttttctggtcaagttccttccacaattagtaacctgacccggttaactaagttgtaccttgaccaaaacaagctcactagtagtttcccacttgtacagaatctaaccaacctctacgaattagacctttcatataataagttctttggagtcatcccttcttctctcctcactctgcctttcttagcacatcttgctctacgtgaaaacaatcttgctggttctgttgaagtttcaaactcctctacctcatctaggctcgaaatcatgtatctcgggtctaaccattttgaaggacaaatcctagagcctatctcaaagctcatcaacctcaagcatcttgacctttctttcctaaacacaagctacccaatagacttaaaactcttctcctccctcaaatctttgcggtcactggatctttctggaaacagtatatcttcggccagtttaagttcagattcatacatcccgttgaccctggaaatgttgaccttgaggcactgtgacatcaacgagttccccaacatcttaaagaccctcaaggagttggtgtatatagacatatccaacaacagaatgaaagggaagatccctgagtggttatggagcctacctcttctacagtcagtaactcttggaaataattatttcacaggtttccaaggttcggcggagattttagtaaattcatcagtgctgctattatatttggattcaaacaattttgaaggagcacttcctgatctaccactctctatcaaaggcttcggtgtggctagtaatagtttcacaagtgagatacctctttcaatctgcaaccgaagctctctcgctgctattgatctatcctacaacaacttcactggtcccattcctccatgtttgcgtaatttggaacttgtgtatctccggaacaacaacctggaaggaagtatccctgacgcgctctgtgatggtgcctctttacggacactcgatgttagccataaccgattaacagggaagcttccaaggtcttttgtaaactgctcatcgctaaagtttctaagcgttataaacaacagaattgaagatacgtttccgttctggctcaaagctttaccgaatttgcaagtccttactcttcgctcaaacagattttatggtcctatatctcctccgcatcaaggtcctctcgggtttccagagctgcggatatttgaaatatctgacaataagtttacaggaagcttgccaccaaactactttgtgaactggaaagcatcatcacgcacgatgaatcaagatgggggtttatatatggtatacgaggagaagctgttcgacgaaggcggctatggttatacagatgctttagatttgcaatacaaaggtctacacatggagcaagctaaggccctcacttcctacgccgccattgatttttctggaaatagactcgaaggacagattcctgaatctattggactcttgaaggcactgattgcagtcaatatatcaaacaacgccttcacaggccatattcccctgtctatggccaatcttgagaatctcgagtcactagacatgtcaagaaaccaactctcggggactattcctaatggactagggagcatttcgtttttggcgtacatcaacgtgtctcacaaccaactcacgggtgaaataccacaaggaacacagattactgggcaatctaaatcttccttcgaagggaatgcagggctttgtggtctacctctcaaggaaagttgcttcggcactggtgcacctccgatgtatcaccaaaagcaagaggacaaggaggaggaggaggccgaggaggacgagcaggagctcaactggaaggccgtggcaatagggtatggatctggattattgcttggattggcaatagcacaagttattgcttcatacaaaccggagtggcttgtcaagataattggtctgaataaacgcagaaagcgt

SEQ ID NO: 56 - protein, 888 aa, Artificial Sequence
  Fusion protein
MSKALLHLHFLSLFLLCCVCHSSIFTLNFHFTGIVACRPHQIQAFTKFTNEFDTRGCNNSDTFNGVWCDNSTGAVAVLQLRKCLSGTLKSNSSLFGFHQLRYVDLQNNNLTSSSLPSGFGNLKRLEGLFLSSNGFLGQVPSSFSNLTMLAQLDLSYNKLTGSFPLVRGLRKLIVLDLSYNHFSGTLNPNSSLFELHQLRYLNLAFNNFSSSLPSKFGNLHRLENLILSSNGFSGQVPSTISNLTRLTKLYLDQNKLTSSFPLVQNLTNLYELDLSYNKFFGVIPSSLLTLPFLAHLALRENNLAGSVEVSNSSTSSRLEIMYLGSNHFEGQILEPISKLINLKHLDLSFLNTSYPIDLKLFSSLKSLRSLDLSGNSISSASLSSDSYIPLTLEMLTLRHCDINEFPNILKTLKELVYIDISNNRMKGKIPEWLWSLPLLQSVTLGNNYFTGFQGSAEILVNSSVLLLYLDSNNFEGALPDLPLSIKGFGVASNSFTSEIPLSICNRSSLAAIDLSYNNFTGPIPPCLRNLELVYLRNNNLEGSIPDALCDGASLRTLDVSHNRLTGKLPRSFVNCSSLKFLSVINNRIEDTFPFWLKALPNLQVLTLRSNRFYGPISPPHQGPLGFPELRIFEISDNKFTGSLPPNYFVNWKASSRTMNQDGGLYMVYEEKLFDEGGYGYTDALDLQYKGLHMEQAKALTSYAAIDFSGNRLEGQIPESIGLLKALIAVNISNNAFTGHIPLSMANLENLESLDMSRNQLSGTIPNGLGSISFLAYINVSHNQLTGEIPQGTQITGQSKSSFEGNAGLCGLPLKESCFGTGAPPMYHQKQEDKEEEEAEEDEQELNWKAVAIGYGSGLLLGLAIAQVIASYKPEWLVKIIGLNKRRKR

SEQ ID NO: 57 - DNA, 2748 bp, Artificial Sequence
  Encodes fusion
atgtcaaaggcgcttttgcatttgcattttctttctctgtttttactctgttgtgtctgccattcaagtatttttactttaaattttcattttactggtattgtggcctgtcgtccccaccagattcaagccttcacgaagttcacgaacgagtttgacacccgcggttgcaacaacagtgacacctttaatggagtctggtgcgataactcgacgggtgcggtcgcagtgctacaactaaggaagtgtctcagtggaactttgaagtccaacagtagcctcttcgggtttcatcaactccgttacgttgatctccaaaacaacaacttaacctcctcttcactcccttccgggtttggaaatctcaaaagattagagggcttgtttctttcctctaatggcttcctcggccaagttccttcctcattcagtaacctaacaatgcttgctcaattagacctttcttataacaagctcactggtagtttcccacttgtccggggtctaagaaagctcattgttttagacctttcatataatcacttctccggaactctgaatccaaacagtagcctctttgagttgcaccagctacgttaccttaatctcgcttttaacaactttagttcctcactcccttccaaatttggcaatctccatagattagagaacttgattctttcctctaatggcttttctggtcaagttccttccacaattagtaacctgacccggttaactaagttgtaccttgaccaaaacaagctcactagtagtttcccacttgtacagaatctaaccaacctctacgaattagacctttcatataataagttctttggagtcatcccttcttctctcctcactctgcctttcttagcacatcttgctctacgtgaaaacaatcttgctggttctgttgaagtttcaaactcctctacctcatctaggctcgaaatcatgtatctcgggtctaaccattttgaaggacaaatcctagagcctatctcaaagctcatcaacctcaagcatcttgacctttctttcctaaacacaagctacccaatagacttaaaactcttctcctccctcaaatctttgcggtcactggatctttctggaaacagtatatcttcggccagtttaagttcagattcatacatcccgttgaccctggaaatgttgaccttgaggcactgtgacatcaacgagttccccaacatcttaaagaccctcaaggagttggtgtatatagacatatccaacaacagaatgaaagggaagatccctgagtggttatggagcctacctcttctacagtcagtaactcttggaaataattatttcacaggtttccaaggttcggcggagattttagtaaattcatcagtgctgctattatatttggattcaaacaattttgaaggagcacttcctgatctaccactctctatcaaaggcttcggtgtggctagtaatagtttcacaagtgagatacctctttcaatctgcaaccgaagctctctcgctgctattgatctatcctacaacaacttcactggtcccattcctccatgtttgcgtaatttggaacttgtgtatctccggaacaacaacctggaaggaagtatccctgacgcgctctgtgatggtgcctctttacggacactcgatgttagccataaccgattaacagggaagcttccaaggtcttttgtaaactgctcatcgctaaagtttctaagcgttataaacaacagaattgaagatacgtttccgttctggctcaaagctttaccgaatttgcaagtccttactcttcgctcaaacagattttatggtcctatatctcctccgcatcaaggtcctctcgggtttccagagctgcggatatttgaaatatctgacaataagtttacaggaagcttgccaccaaactactttgtgaactggaaagcatcatcacgcacgatgaatcaagatgggggtttatatatggtatacgaggagaagctgttcgacgaaggcggctatggttatacagatgctttagatttgcaatacaaaggtctacacatggagcaagctaaggccctcacttcctacgccgccattgatttttctggaaatagactcgaaggacagattcctgaatctattggactcttgaaggcactgattgcagtcaatatatcaaacaacgccttcacaggccatattcccctgtctatggccaatcttgagaatctcgagtcactagacatgtcaagaaaccaactctcggggactattcctaatggactagggagcatttcgtttttggcgtacatcaacgtgtctcacaaccaactcacgggtgaaataccacaaggaacacagattactgggcaatctaaatcttccttcgaagggaatgcagggctttgtggtctacctctcaaggaaagttgcttcggcactggtgcacctccgatgtatcaccaaaagcaagaggacaaggaggaggaggaggccgaggaggacgagcaggagctcaactggaaggccgtggcaatagggtatggatctggattattgcttggattggcaatagcacaagttattgcttcatacaaaccggagtggcttgtcaagataattggtctgaataaacgcagaaagcgttcggattataaggaccatgacggagactataaggaccatgacctcgacgctgcagcagcggattataaggacgatgacgataag

SEQ ID NO: 58 - protein, 916 aa, Artificial Sequence
  Fusion protein
MSKALLHLHFLSLFLLCCVCHSSIFTLNFHFTGIVACRPHQIQAFTKFTNEFDTRGCNNSDTFNGVWCDNSTGAVAVLQLRKCLSGTLKSNSSLFGFHQLRYVDLQNNNLTSSSLPSGFGNLKRLEGLFLSSNGFLGQVPSSFSNLTMLAQLDLSYNKLTGSFPLVRGLRKLIVLDLSYNHFSGTLNPNSSLFELHQLRYLNLAFNNFSSSLPSKFGNLHRLENLILSSNGFSGQVPSTISNLTRLTKLYLDQNKLTSSFPLVQNLTNLYELDLSYNKFFGVIPSSLLTLPFLAHLALRENNLAGSVEVSNSSTSSRLEIMYLGSNHFEGQILEPISKLINLKHLDLSFLNTSYPIDLKLFSSLKSLRSLDLSGNSISSASLSSDSYIPLTLEMLTLRHCDINEFPNILKTLKELVYIDISNNRMKGKIPEWLWSLPLLQSVTLGNNYFTGFQGSAEILVNSSVLLLYLDSNNFEGALPDLPLSIKGFGVASNSFTSEIPLSICNRSSLAAIDLSYNNFTGPIPPCLRNLELVYLRNNNLEGSIPDALCDGASLRTLDVSHNRLTGKLPRSFVNCSSLKFLSVINNRIEDTFPFWLKALPNLQVLTLRSNRFYGPISPPHQGPLGFPELRIFEISDNKFTGSLPPNYFVNWKASSRTMNQDGGLYMVYEEKLFDEGGYGYTDALDLQYKGLHMEQAKALTSYAAIDFSGNRLEGQIPESIGLLKALIAVNISNNAFTGHIPLSMANLENLESLDMSRNQLSGTIPNGLGSISFLAYINVSHNQLTGEIPQGTQITGQSKSSFEGNAGLCGLPLKESCFGTGAPPMYHQKQEDKEEEEAEEDEQELNWKAVAIGYGSGLLLGLAIAQVIASYKPEWLVKIIGLNKRRKRSDYKDHDGDYKDHDLDAAAADYKDDDDK

SEQ ID NO: 59 - DNA, 3777 bp, Artificial Sequence
  Encodes fusion protein
atgtcaaaggcgcttttgcatttgcattttctttctctgtttttactctgttgtgtctgccattcaagtatttttactttaaattttcattttactggtattgtggcctgtcgtccccaccagattcaagccttcacgaagttcacgaacgagtttgacacccgcggttgcaacaacagtgacacctttaatggagtctggtgcgataactcgacgggtgcggtcgcagtgctacaactaaggaagtgtctcagtggaactttgaagtccaacagtagcctcttcgggtttcatcaactccgttacgttgatctccaaaacaacaacttaacctcctcttcactcccttccgggtttggaaatctcaaaagattagagggcttgtttctttcctctaatggcttcctcggccaagttccttcctcattcagtaacctaacaatgcttgctcaattagacctttcttataacaagctcactggtagtttcccacttgtccggggtctaagaaagctcattgttttagacctttcatataatcacttctccggaactctgaatccaaacagtagcctctttgagttgcaccagctacgttaccttaatctcgcttttaacaactttagttcctcactcccttccaaatttggcaatctccatagattagagaacttgattctttcctctaatggcttttctggtcaagttccttccacaattagtaacctgacccggttaactaagttgtaccttgaccaaaacaagctcactagtagtttcccacttgtacagaatctaaccaacctctacgaattagacctttcatataataagttctttggagtcatcccttcttctctcctcactctgcctttcttagcacatcttgctctacgtgaaaacaatcttgctggttctgttgaagtttcaaactcctctacctcatctaggctcgaaatcatgtatctcgggtctaaccattttgaaggacaaatcctagagcctatctcaaagctcatcaacctcaagcatcttgacctttctttcctaaacacaagctacccaatagacttaaaactcttctcctccctcaaatctttgcggtcactggatctttctggaaacagtatatcttcggccagtttaagttcagattcatacatcccgttgaccctggaaatgttgaccttgaggcactgtgacatcaacgagttccccaacatcttaaagaccctcaaggagttggtgtatatagacatatccaacaacagaatgaaagggaagatccctgagtggttatggagcctacctcttctacagtcagtaactcttggaaataattatttcacaggtttccaaggttcggcggagattttagtaaattcatcagtgctgctattatatttggattcaaacaattttgaaggagcacttcctgatctaccactctctatcaaaggcttcggtgtggctagtaatagtttcacaagtgagatacctctttcaatctgcaaccgaagctctctcgctgctattgatctatcctacaacaacttcactggtcccattcctccatgtttgcgtaatttggaacttgtgtatctccggaacaacaacctggaaggaagtatccctgacgcgctctgtgatggtgcctctttacggacactcgatgttagccataaccgattaacagggaagcttccaaggtcttttgtaaactgctcatcgctaaagtttctaagcgttataaacaacagaattgaagatacgtttccgttctggctcaaagctttaccgaatttgcaagtccttactcttcgctcaaacagattttatggtcctatatctcctccgcatcaaggtcctctcgggtttccagagctgcggatatttgaaatatctgacaataagtttacaggaagcttgccaccaaactactttgtgaactggaaagcatcatcacgcacgatgaatcaagatgggggtttatatatggtatacgaggagaagctgttcgacgaaggcggctatggttatacagatgctttagatttgcaatacaaaggtctacacatggagcaagctaaggccctcacttcctacgccgccattgatttttctggaaatagactcgaaggacagattcctgaatctattggactcttgaaggcactgattgcagtcaatatatcaaacaacgccttcacaggccatattcccctgtctatggccaatcttgagaatctcgagtcactagacatgtcaagaaaccaactctcggggactattcctaatggactagggagcatttcgtttttggcgtacatcaacgtgtctcacaaccaactcacgggtgaaataccacaaggaacacagattactgggcaatctaaatcttccttcgaagggaatgcagggctttgtggtctacctctcaaggaaagttgcttcggcactggtgcacctccgatgtatcaccaaaagcaagaggacaaggaggaggaggaggccgaggaggacgagcaggagctcaactggaaggttgtcagtggtatttgtataggtatagcttcgcttttgttaatcataattgtggcttctctgtgttggttcatgaagaggaaaaagaaaaacaatgccagtgatggtaacccatctgattctactactttggggatgttccatgagaaggtaagttatgaagagcttcatagtgcaacaagtcgcttctcttcaaccaatttgattggttcaggcaatttcggtaatgtgtttaaaggattgcttggccctgagaataaactcgtcgcggttaaagttttgaacctcctaaagcatggagcgacgaaaagctttatggcggaatgtgaaaccttcaagggtatacgacatcgtaaccttgtaaaactgataacggtttgttcaagccttgattccgagggaaatgatttcagagctctggtctatgagttcatgccaaaaggaagtctggatatgtggctgcagctagaagatctggaaagggtaaacgatcactcgagatctttaacacccgcagagaaactcaacatagcaatagatgtggcttcagctttggagtatctgcacgttcattgtcatgaccctgtagctcactgtgatattaagccaagcaacattcttctagacgatgatctgactgctcatgttagtgactttggtttggctcagctcctctataaatacgatcgagaatcctttctaaaccagtttagttctgctggtgtcagaggcaccattggctatgccgcgccaggttaataaacatctatatgcaaaaagtattgtttaacaaaagagttatccaacctcattgtgtgttgtttctttgaaatatgtgcagagtatggaatgggaggccaaccatcaatacaaggagatgtgtacagcttcggaattctacttttggagatgtttagtggaaagaaaccaacagatgaatcatttgcaggcgattataacctccacagctacacaaagtctatattatcgggttgcacgagcagtggaggcagcaacgccattgatgaggggttgagactggttttgcaggtggggataaagtgttctgaagaatatccgagggataggatgagaacggatgaagcagtacgagaattaatctcaataagatctaagttcttcagttccaagacgactattacagagagtcctcgagatgctccgcaaagttctcctcaggaatggatgttaaatacggacatgcatactatg

SEQ ID NO: 60 - protein, 1230 aa, Artificial Sequence
  Fusion protein
MSKALLHLHFLSLFLLCCVCHSSIFTLNFHFTGIVACRPHQIQAFTKFTNEFDTRGCNNSDTFNGVWCDNSTGAVAVLQLRKCLSGTLKSNSSLFGFHQLRYVDLQNNNLTSSSLPSGFGNLKRLEGLFLSSNGFLGQVPSSFSNLTMLAQLDLSYNKLTGSFPLVRGLRKLIVLDLSYNHFSGTLNPNSSLFELHQLRYLNLAFNNFSSSLPSKFGNLHRLENLILSSNGFSGQVPSTISNLTRLTKLYLDQNKLTSSFPLVQNLTNLYELDLSYNKFFGVIPSSLLTLPFLAHLALRENNLAGSVEVSNSSTSSRLEIMYLGSNHFEGQILEPISKLINLKHLDLSFLNTSYPIDLKLFSSLKSLRSLDLSGNSISSASLSSDSYIPLTLEMLTLRHCDINEFPNILKTLKELVYIDISNNRMKGKIPEWLWSLPLLQSVTLGNNYFTGFQGSAEILVNSSVLLLYLDSNNFEGALPDLPLSIKGFGVASNSFTSEIPLSICNRSSLAAIDLSYNNFTGPIPPCLRNLELVYLRNNNLEGSIPDALCDGASLRTLDVSHNRLTGKLPRSFVNCSSLKFLSVINNRIEDTFPFWLKALPNLQVLTLRSNRFYGPISPPHQGPLGFPELRIFEISDNKFTGSLPPNYFVNWKASSRTMNQDGGLYMVYEEKLFDEGGYGYTDALDLQYKGLHMEQAKALTSYAAIDFSGNRLEGQIPESIGLLKALIAVNISNNAFTGHIPLSMANLENLESLDMSRNQLSGTIPNGLGSISFLAYINVSHNQLTGEIPQGTQITGQSKSSFEGNAGLCGLPLKESCFGTGAPPMYHQKQEDKEEEEAEEDEQELNWKVVSGICIGIASLLLIIIVASLCWFMKRKKKNNASDGNPSDSTTLGMFHEKVSYEELHSATSRFSSTNLIGSGNFGNVFKGLLGPENKLVAVKVLNLLKHGATKSFMAECETFKGIRHRNLVKLITVCSSLDSEGNDFRALVYEFMPKGSLDMWLQLEDLERVNDHSRSLTPAEKLNIAIDVASALEYLHVHCHDPVAHCDIKPSNILLDDDLTAHVSDFGLAQLLYKYDRESFLNQFSSAGVRGTIGYAAPEYGMGGQPSIQGDVYSFGILLLEMFSGKKPTDESFAGDYNLHSYTKSILSGCTSSGGSNAIDEGLRLVLQVGIKCSEEYPRDRMRTDEAVRELISIRSKFFSSKTTITESPRDAPQSSPQEWMLNTDMHTM

SEQ ID NO: 61 - DNA, 3864 bp, Artificial Sequence
  Encodes fusion protein
atgtcaaaggcgcttttgcatttgcattttctttctctgtttttactctgttgtgtctgccattcaagtatttttactttaaattttcattttactggtattgtggcctgtcgtccccaccagattcaagccttcacgaagttcacgaacgagtttgacacccgcggttgcaacaacagtgacacctttaatggagtctggtgcgataactcgacgggtgcggtcgcagtgctacaactaaggaagtgtctcagtggaactttgaagtccaacagtagcctcttcgggtttcatcaactccgttacgttgatctccaaaacaacaacttaacctcctcttcactcccttccgggtttggaaatctcaaaagattagagggcttgtttctttcctctaatggcttcctcggccaagttccttcctcattcagtaacctaacaatgcttgctcaattagacctttcttataacaagctcactggtagtttcccacttgtccggggtctaagaaagctcattgttttagacctttcatataatcacttctccggaactctgaatccaaacagtagcctctttgagttgcaccagctacgttaccttaatctcgcttttaacaactttagttcctcactcccttccaaatttggcaatctccatagattagagaacttgattctttcctctaatggcttttctggtcaagttccttccacaattagtaacctgacccggttaactaagttgtaccttgaccaaaacaagctcactagtagtttcccacttgtacagaatctaaccaacctctacgaattagacctttcatataataagttctttggagtcatcccttcttctctcctcactctgcctttcttagcacatcttgctctacgtgaaaacaatcttgctggttctgttgaagtttcaaactcctctacctcatctaggctcgaaatcatgtatctcgggtctaaccattttgaaggacaaatcctagagcctatctcaaagctcatcaacctcaagcatcttgacctttctttcctaaacacaagctacccaatagacttaaaactcttctcctccctcaaatctttgcggtcactggatctttctggaaacagtatatcttcggccagtttaagttcagattcatacatcccgttgaccctggaaatgttgaccttgaggcactgtgacatcaacgagttccccaacatcttaaagaccctcaaggagttggtgtatatagacatatccaacaacagaatgaaagggaagatccctgagtggttatggagcctacctcttctacagtcagtaactcttggaaataattatttcacaggtttccaaggttcggcggagattttagtaaattcatcagtgctgctattatatttggattcaaacaattttgaaggagcacttcctgatctaccactctctatcaaaggcttcggtgtggctagtaatagtttcacaagtgagatacctctttcaatctgcaaccgaagctctctcgctgctattgatctatcctacaacaacttcactggtcccattcctccatgtttgcgtaatttggaacttgtgtatctccggaacaacaacctggaaggaagtatccctgacgcgctctgtgatggtgcctctttacggacactcgatgttagccataaccgattaacagggaagcttccaaggtcttttgtaaactgctcatcgctaaagtttctaagcgttataaacaacagaattgaagatacgtttccgttctggctcaaagctttaccgaatttgcaagtccttactcttcgctcaaacagattttatggtcctatatctcctccgcatcaaggtcctctcgggtttccagagctgcggatatttgaaatatctgacaataagtttacaggaagcttgccaccaaactactttgtgaactggaaagcatcatcacgcacgatgaatcaagatgggggtttatatatggtatacgaggagaagctgttcgacgaaggcggctatggttatacagatgctttagatttgcaatacaaaggtctacacatggagcaagctaaggccctcacttcctacgccgccattgatttttctggaaatagactcgaaggacagattcctgaatctattggactcttgaaggcactgattgcagtcaatatatcaaacaacgccttcacaggccatattcccctgtctatggccaatcttgagaatctcgagtcactagacatgtcaagaaaccaactctcggggactattcctaatggactagggagcatttcgtttttggcgtacatcaacgtgtctcacaaccaactcacgggtgaaataccacaaggaacacagattactgggcaatctaaatcttccttcgaagggaatgcagggctttgtggtctacctctcaaggaaagttgcttcggcactggtgcacctccgatgtatcaccaaaagcaagaggacaaggaggaggaggaggccgaggaggacgagcaggagctcaactggaaggttgtcagtggtatttgtataggtatagcttcgcttttgttaatcataattgtggcttctctgtgttggttcatgaagaggaaaaagaaaaacaatgccagtgatggtaacccatctgattctactactttggggatgttccatgagaaggtaagttatgaagagcttcatagtgcaacaagtcgcttctcttcaaccaatttgattggttcaggcaatttcggtaatgtgtttaaaggattgcttggccctgagaataaactcgtcgcggttaaagttttgaacctcctaaagcatggagcgacgaaaagctttatggcggaatgtgaaaccttcaagggtatacgacatcgtaaccttgtaaaactgataacggtttgttcaagccttgattccgagggaaatgatttcagagctctggtctatgagttcatgccaaaaggaagtctggatatgtggctgcagctagaagatctggaaagggtaaacgatcactcgagatctttaacacccgcagagaaactcaacatagcaatagatgtggcttcagctttggagtatctgcacgttcattgtcatgaccctgtagctcactgtgatattaagccaagcaacattcttctagacgatgatctgactgctcatgttagtgactttggtttggctcagctcctctataaatacgatcgagaatcctttctaaaccagtttagttctgctggtgtcagaggcaccattggctatgccgcgccaggttaataaacatctatatgcaaaaagtattgtttaacaaaagagttatccaacctcattgtgtgttgtttctttgaaatatgtgcagagtatggaatgggaggccaaccatcaatacaaggagatgtgtacagcttcggaattctacttttggagatgtttagtggaaagaaaccaacagatgaatcatttgcaggcgattataacctccacagctacacaaagtctatattatcgggttgcacgagcagtggaggcagcaacgccattgatgaggggttgagactggttttgcaggtggggataaagtgttctgaagaatatccgagggataggatgagaacggatgaagcagtacgagaattaatctcaataagatctaagttcttcagttccaagacgactattacagagagtcctcgagatgctccgcaaagttctcctcaggaatggatgttaaatacggacatgcatactatggcttcggattataaggaccatgacggagactataaggaccatgacctcgacgctgcagcagcggattataaggacgatgacgataag

SEQ ID NO: 62 - protein, 1259 aa, Artificial Sequence
  Fusion protein
MSKALLHLHFLSLFLLCCVCHSSIFTLNFHFTGIVACRPHQIQAFTKFTNEFDTRGCNNSDTFNGVWCDNSTGAVAVLQLRKCLSGTLKSNSSLFGFHQLRYVDLQNNNLTSSSLPSGFGNLKRLEGLFLSSNGFLGQVPSSFSNLTMLAQLDLSYNKLTGSFPLVRGLRKLIVLDLSYNHFSGTLNPNSSLFELHQLRYLNLAFNNFSSSLPSKFGNLHRLENLILSSNGFSGQVPSTISNLTRLTKLYLDQNKLTSSFPLVQNLTNLYELDLSYNKFFGVIPSSLLTLPFLAHLALRENNLAGSVEVSNSSTSSRLEIMYLGSNHFEGQILEPISKLINLKHLDLSFLNTSYPIDLKLFSSLKSLRSLDLSGNSISSASLSSDSYIPLTLEMLTLRHCDINEFPNILKTLKELVYIDISNNRMKGKIPEWLWSLPLLQSVTLGNNYFTGFQGSAEILVNSSVLLLYLDSNNFEGALPDLPLSIKGFGVASNSFTSEIPLSICNRSSLAAIDLSYNNFTGPIPPCLRNLELVYLRNNNLEGSIPDALCDGASLRTLDVSHNRLTGKLPRSFVNCSSLKFLSVINNRIEDTFPFWLKALPNLQVLTLRSNRFYGPISPPHQGPLGFPELRIFEISDNKFTGSLPPNYFVNWKASSRTMNQDGGLYMVYEEKLFDEGGYGYTDALDLQYKGLHMEQAKALTSYAAIDFSGNRLEGQIPESIGLLKALIAVNISNNAFTGHIPLSMANLENLESLDMSRNQLSGTIPNGLGSISFLAYINVSHNQLTGEIPQGTQITGQSKSSFEGNAGLCGLPLKESCFGTGAPPMYHQKQEDKEEEEAEEDEQELNWKVVSGICIGIASLLLIIIVASLCWFMKRKKKNNASDGNPSDSTTLGMFHEKVSYEELHSATSRFSSTNLIGSGNFGNVFKGLLGPENKLVAVKVLNLLKHGATKSFMAECETFKGIRHRNLVKLITVCSSLDSEGNDFRALVYEFMPKGSLDMWLQLEDLERVNDHSRSLTPAEKLNIAIDVASALEYLHVHCHDPVAHCDIKPSNILLDDDLTAHVSDFGLAQLLYKYDRESFLNQFSSAGVRGTIGYAAPEYGMGGQPSIQGDVYSFGILLLEMFSGKKPTDESFAGDYNLHSYTKSILSGCTSSGGSNAIDEGLRLVLQVGIKCSEEYPRDRMRTDEAVRELISIRSKFFSSKTTITESPRDAPQSSPQEWMLNTDMHTMASDYKDHDGDYKDHDLDAAAADYKDDDDK

SEQ ID NO: 63 - protein, 20 aa, Phytophthora parasitica
AIMYSWYFPKDSPVTGLGHR

SEQ ID NO: 64 - protein, 24 aa, Colletotrichum graminicola M1.001
AIMYAYYMPKDSPSPGLGHRHDWE

SEQ ID NO: 65 - protein, 24 aa, Fusarium graminearum PH-1
AIMYSWYMPKDSPSPGLGHRHDWE

SEQ ID NO: 66 - protein, 23 aa, Fusarium verticillioides 7600
IMYSWYMPKDSPSPGLGHRHDWE

SEQ ID NO: 67 - protein, 27 aa, Stenocarpella maydis A1-1
VVMYCWYMPKDQPLDGNTAGGHRHEFE

SEQ ID NO: 68 - protein, 27 aa, Aspergillus flavus NRRL3357
GIMYAWYMPKDMPNSGVSTGAHRHDWE

SEQ ID NO: 69 - protein, 24 aa, Aspergillus flavus NRRL3357
ALMYSWYFPKDEPSTGLGHRHDWE

SEQ ID NO: 70 - protein, 24 aa, Aspergillus flavus NRRL3357
ALMYSWYFPKDQAAPGMGHRHDWE

SEQ ID NO: 71 - protein, 27 aa, Aspergillus parasiticus SU-1
GIMYAWYMPKDMPNSGVSAGAHRHDWE

SEQ ID NO: 72 - DNA, 828 bp, Artificial Sequence
  Synthetic promoter-UTR
aacatggtggagcacgacactctggtctactccaaaaatgtcaaagatacagtctcagaagatcaaagggctattgagacttttcaacaaaggataatttcgggaaacctcctcggattccattgcccagctatctgtcacttcatcgaaaggacagtagaaaaggaaggtggctcctacaaatgccatcattgcgataaaggaaaggctatcattcaagatctctctgccgacagtggtcccaaagatggacccccacccacgaggagcatcgtggaaaaagaagaggttccaaccacgtctacaaagcaagtggattgatgtgataacatggtggagcacgacactctggtctactccaaaaatgtcaaagatacagtctcagaagatcaaagggctattgagacttttcaacaaaggataatttcgggaaacctcctcggattccattgcccagctatctgtcacttcatcgaaaggacagtagaaaaggaaggtggctcctacaaatgccatcattgcgataaaggaaaggctatcattcaagatctctctgccgacagtggtcccaaagatggacccccacccacgaggagcatcgtggaaaaagaagaggttccaaccacgtctacaaagcaagtggattgatgtgacatctccactgacgtaagggatgacgcacaatcccactatccttcgcaagacccttcctctatataaggaagttcatttcatttggagaggacacgctcgagtataagagctcatttttacaacaattaccaacaacaacaaacaacaaacaacattacaattacatttacaatt

SEQ ID NO: 73 - DNA, 642 bp, Pisum sativum
agctttcgttcgtatcatcggtttcgacaacgttcgtcaagttcaatgcatcagtttcattgcgcacacaccagaatcctactgagtttgagtattatggcattgggaaaactgtttttcttgtaccatttgttgtgcttgtaatttactgtgttttttattcggttttcgctatcgaactgtgaaatggaaatggatggagaagagttaatgaatgatatggtccttttgttcattctcaaattaatattatttgttttttctcttatttgttgtgtgttgaatttgaaattataagagatatgcaaacattttgttttgagtaaaaatgtgtcaaatcgtggcctctaatgaccgaagttaatatgaggagtaaaacacttgtagttgtaccattatgcttattcactaggcaacaaatatattttcagacctagaaaagctgcaaatgttactgaatacaagtatgtcctcttgtgttttagacatttatgaactttcctttatgtaattttccagaatccttgtcagattctaatcattgctttataattatagttatactcatggatttgtagttgagtatgaaaatattttttaatgcattttatgacttgccaattgattgacaacatgcatcaa

SEQ ID NO: 74 - DNA, 2686 bp, Artificial Sequence
  vector
  misc_feature (1)..(2686): circular DNA
gcgcccaatacgcaaaccgcctctccccgcgcgttggccgattcattaatgcagctggcacgacaggtttcccgactggaaagcgggcagtgagcgcaacgcaattaatgtgagttagctcactcattaggcaccccaggctttacactttatgcttccggctcgtatgttgtgtggaattgtgagcggataacaatttcacacaggaaacagctatgaccatgattacgccaagcttgcatgcctgcaggtcgactctagaggatccccgggtaccgagctcgaattcactggccgtcgttttacaacgtcgtgactgggaaaaccctggcgttacccaacttaatcgccttgcagcacatccccctttcgccagctggcgtaatagcgaagaggcccgcaccgatcgcccttcccaacagttgcgcagcctgaatggcgaatggcgcctgatgcggtattttctccttacgcatctgtgcggtatttcacaccgcatatggtgcactctcagtacaatctgctctgatgccgcatagttaagccagccccgacacccgccaacacccgctgacgcgccctgacgggcttgtctgctcccggcatccgcttacagacaagctgtgaccgtctccgggagctgcatgtgtcagaggttttcaccgtcatcaccgaaacgcgcgagacgaaagggcctcgtgatacgcctatttttataggttaatgtcatgataataatggtttcttagacgtcaggtggcacttttcggggaaatgtgcgcggaacccctatttgtttatttttctaaatacattcaaatatgtatccgctcatgagacaataaccctgataaatgcttcaataatattgaaaaaggaagagtatgagtattcaacatttccgtgtcgcccttattcccttttttgcggcattttgccttcctgtttttgctcacccagaaacgctggtgaaagtaaaagatgctgaagatcagttgggtgcacgagtgggttacatcgaactggatctcaacagcggtaagatccttgagagttttcgccccgaagaacgttttccaatgatgagcacttttaaagttctgctatgtggcgcggtattatcccgtattgacgccgggcaagagcaactcggtcgccgcatacactattctcagaatgacttggttgagtactcaccagtcacagaaaagcatcttacggatggcatgacagtaagagaattatgcagtgctgccataaccatgagtgataacactgcggccaacttacttctgacaacgatcggaggaccgaaggagctaaccgcttttttgcacaacatgggggatcatgtaactcgccttgatcgttgggaaccggagctgaatgaagccataccaaacgacgagcgtgacaccacgatgcctgtagcaatggcaacaacgttgcgcaaactattaactggcgaactacttactctagcttcccggcaacaattaatagactggatggaggcggataaagttgcaggaccacttctgcgctcggcccttccggctggctggtttattgctgataaatctggagccggtgagcgtgggtctcgcggtatcattgcagcactggggccagatggtaagccctcccgtatcgtagttatctacacgacggggagtcaggcaactatggatgaacgaaatagacagatcgctgagataggtgcctcactgattaagcattggtaactgtcagaccaagtttactcatatatactttagattgatttaaaacttcatttttaatttaaaaggatctaggtgaagatcctttttgataatctcatgaccaaaatcccttaacgtgagttttcgttccactgagcgtcagaccccgtagaaaagatcaaaggatcttcttgagatcctttttttctgcgcgtaatctgctgcttgcaaacaaaaaaaccaccgctaccagcggtggtttgtttgccggatcaagagctaccaactctttttccgaaggtaactggcttcagcagagcgcagataccaaatactgttcttctagtgtagccgtagttaggccaccacttcaagaactctgtagcaccgcctacatacctcgctctgctaatcctgttaccagtggctgctgccagtggcgataagtcgtgtcttaccgggttggactcaagacgatagttaccggataaggcgcagcggtcgggctgaacggggggttcgtgcacacagcccagcttggagcgaacgacctacaccgaactgagatacctacagcgtgagctatgagaaagcgccacgcttcccgaagggagaaaggcggacaggtatccggtaagcggcagggtcggaacaggagagcgcacgagggagcttccagggggaaacgcctggtatctttatagtcctgtcgggtttcgccacctctgacttgagcgtcgatttttgtgatgctcgtcaggggggcggagcctatggaaaaacgccagcaacgcggcctttttacggttcctggccttttgctggccttttgctcacatgttctttcctgcgttatcccctgattctgtggataaccgtattaccgcctttgagtgagctgataccgctcgccgcagccgaacgaccgagcgcagcgagtcagtgagcgaggaagcggaaga

SEQ ID NO: 75 - DNA, 3897 bp, Artificial Sequence
  Synthetic construct
  misc_feature (1)..(3897): circular DNA
ggaggtgcagcgtgacccggtcgtgcccctctctagagataatgagcattgcatgtctaagttataaaaaattaccacatattttttttgtcacacttgtttgaagtgcagtttatctatctttatacatatatttaaactttactctacgaataatataatctatagtactacaataatatcagtgttttagagaatcatataaatgaacagttagacatggtctaaaggacaattgagtattttgacaacaggactctacagttttatctttttagtgtgcatgtgttctcctttttttttgcaaatagcttcacctatataatacttcatccattttattagtacatccatttagggtttagggttaatggtttttatagactaatttttttagtacatctattttattctattttagcctctaaattaagaaaactaaaactctattttagtttttttatttaataatttagatataaaatagaataaaataaagtgactaaaaattaaacaaataccctttaagaaattaaaaaaactaaggaaacatttttcttgtttcgagtagataatgccagcctgttaaacgccgtcgacgagtctaacggacaccaaccagcgaaccagcagcgtcgcgtcgggccaagcgaagcagacggcacggcatctctgtcgctgcctctggacccctctcgagagttccgctccaccgttggacttgctccgctgtcggcatccagaaattgcgtggcggagcggcagacgtgagccggcacggcaggcggcctcctcctcctctcacggcacggcagctacgggggattcctttcccaccgctccttcgctttcccttcctcgcccgccgtaataaatagacaccccctccacaccctctttccccaacctcgtgttgttcggagcgcacacacacacaaccagatctcccccaaatccacccgtcggcacctccgcttcaaggtacgccgctcgtcctccccccccccccctctctaccttctctagatcggcgttccggtccatggttagggcccggtagttctacttctgttcatgtttgtgttagatccgtgtttgtgttagatccgtgctgctagcgttcgtacacggatgcgacctgtacgtcagacacgttctgattgctaacttgccagtgtttctctttggggaatcctgggatggctctagccgttccgcagacgggatcgatttcatgattttttttgtttcgttgcatagggtttggtttgcccttttcctttatttcaatatatgccgtgcacttgtttgtcgggtcatcttttcatgcttttttttgtcttggttgtgatgatgtggtctggttgggcggtcgttctagatcggagtagaattctgtttcaaactacctggtggatttattaattttggatctgtatgtgtgtgccatacatattcatagttacgaattgaagatgatggatggaaatatcgatctaggataggtatacatgttgatgcgggttttactgatgcatatacagagatgctttttgttcgcttggttgtgatgatgtggtgtggttgggcggtcgttcattcgttctagatcggagtagaatactgtttcaaactacctggtgtatttattaattttggaactgtatgtgtgtgtcatacatcttcatagttacgagtttaagatggatggaaatatcgatctaggataggtatacatgttgatgtgggttttactgatgcatatacatgatggcatatgcagcatctattcatatgctctaaccttgagtacctatctattataataaacaagtatgttttataattattttgatcttgatatacttggatgatggcatatgcagcagctatatgtggatttttttagccctgccttcatacgctatttatttgcttggtactgtttcttttgtcgatgctcaccctgttgtttggtgttacttctgcaggaatggtcgactcatcacgtcgtaagtggaataaggcaggtcacgcagtcagagctataggtcggctgagctcacccgtggtttccgagcggatgtaccccgaggacggcgccctgaagagcgagatcaagaaggggctgaggctgaaggacggcggccactacgccgccgaggtcaagaccacctacaaggccaagaagcccgtgcagctgcccggcgcctacatcgtcgacatcaagttggacatcgtgtcccacaacgaggactacaccatcgtggaacagtgcgaacgcgccgagggccgccactccaccggcggcatggacgagctgtacaagggaggtacaggcgggagtctggtgagcaagggcgaggaggataacagggccatcgtcaaggagttcatgcgcttcaagttgcacatggagggctccgtgaacggccacgagttcgagatcgagggcgagggcgagggccgcccctacgaggcctttcagaccgctaagctgaaggtgaccaagggtggccccctgcccttcgcatgggacatcctgtcccctcagttgatgtacggctccaaggcctacattaagcacccagccgacatccccgactacttcaagctgtccttccccgagggcttcaggtgggagcgcgtgatgaacttcgaggacggcggcattattcacgttagccaggacacctccctgcaggacggcgtattcatctacaaggtgaagctgcgcggcaccaacttcccccccgacggccccgtaatgcagaagaaaaccatgggctgggaggctacgcgtgaccaactgactgaagagcagatcgcagaatttaaagaggctttctccctatttgacaaggacggggatgggacgatgacaaccaaggagctggggacggtgatgcggtcactggggcagaaccccacagaagcagagctgcaggacatgatcaatgaagtagatgccgacggtgacggcacattcgacttccctgagttcctgacgatgatggcaagaaaaatgaatgacacagacagtgaagaggaaattagagaagcgttccgcgtgtttgataaggacggcaatggctacatcggcgcagcagagcttcgccacgtgatgacagaccttggagagaagataacagatgaggaggttgatgaaatgatcagggtagcagacatcgatggggatggtcaggtaaactatgaagagtttgtacaaatgatgacagcgaagtaggcttagctttcgttcgtatcatcggtttcgacaacgttcgtcaagttcaatgcatcagtttcattgcgcacacaccagaatcctactgagtttgagtattatggcattgggaaaactgtttttcttgtaccatttgttgtgcttgtaatttactgtgttttttattcggttttcgctatcgaactgtgaaatggaaatggatggagaagagttaatgaatgatatggtccttttgttcattctcaaattaatattatttgttttttctcttatttgttgtgtgttgaatttgaaattataagagatatgcaaacattttgttttgagtaaaaatgtgtcaaatcgtggcctctaatgaccgaagttaatatgaggagtaaaacacttgtagttgtaccattatgcttattcactaggcaacaaatatattttcagacctagaaaagctgcaaatgttactgaatacaagtatgtcctcttgtgttttagacatttatgaactttcctttatgtaattttccagaatccttgtcagattctaatcattgctttataattatagttatactcatggatttgtagttgagtatgaaaatattttttaatgcattttatgacttgccaattgattgacaacatgcatcaacgct

SEQ ID NO: 76 - DNA, 3234 bp, Artificial Sequence
  Synthetic construct
  misc_feature (1)..(3234)
ggaggtgcagcgtgacccggtcgtgcccctctctagagataatgagcattgcatgtctaagttataaaaaattaccacatattttttttgtcacacttgtttgaagtgcagtttatctatctttatacatatatttaaactttactctacgaataatataatctatagtactacaataatatcagtgttttagagaatcatataaatgaacagttagacatggtctaaaggacaattgagtattttgacaacaggactctacagttttatctttttagtgtgcatgtgttctcctttttttttgcaaatagcttcacctatataatacttcatccattttattagtacatccatttagggtttagggttaatggtttttatagactaatttttttagtacatctattttattctattttagcctctaaattaagaaaactaaaactctattttagtttttttatttaataatttagatataaaatagaataaaataaagtgactaaaaattaaacaaataccctttaagaaattaaaaaaactaaggaaacatttttcttgtttcgagtagataatgccagcctgttaaacgccgtcgacgagtctaacggacaccaaccagcgaaccagcagcgtcgcgtcgggccaagcgaagcagacggcacggcatctctgtcgctgcctctggacccctctcgagagttccgctccaccgttggacttgctccgctgtcggcatccagaaattgcgtggcggagcggcagacgtgagccggcacggcaggcggcctcctcctcctctcacggcacggcagctacgggggattcctttcccaccgctccttcgctttcccttcctcgcccgccgtaataaatagacaccccctccacaccctctttccccaacctcgtgttgttcggagcgcacacacacacaaccagatctcccccaaatccacccgtcggcacctccgcttcaaggtacgccgctcgtcctccccccccccccctctctaccttctctagatcggcgttccggtccatggttagggcccggtagttctacttctgttcatgtttgtgttagatccgtgtttgtgttagatccgtgctgctagcgttcgtacacggatgcgacctgtacgtcagacacgttctgattgctaacttgccagtgtttctctttggggaatcctgggatggctctagccgttccgcagacgggatcgatttcatgattttttttgtttcgttgcatagggtttggtttgcccttttcctttatttcaatatatgccgtgcacttgtttgtcgggtcatcttttcatgcttttttttgtcttggttgtgatgatgtggtctggttgggcggtcgttctagatcggagtagaattctgtttcaaactacctggtggatttattaattttggatctgtatgtgtgtgccatacatattcatagttacgaattgaagatgatggatggaaatatcgatctaggataggtatacatgttgatgcgggttttactgatgcatatacagagatgctttttgttcgcttggttgtgatgatgtggtgtggttgggcggtcgttcattcgttctagatcggagtagaatactgtttcaaactacctggtgtatttattaattttggaactgtatgtgtgtgtcatacatcttcatagttacgagtttaagatggatggaaatatcgatctaggataggtatacatgttgatgtgggttttactgatgcatatacatgatggcatatgcagcatctattcatatgctctaaccttgagtacctatctattataataaacaagtatgttttataattattttgatcttgatatacttggatgatggcatatgcagcagctatatgtggatttttttagccctgccttcatacgctatttatttgcttggtactgtttcttttgtcgatgctcaccctgttgtttggtgttacttctgcaggaatgaccagcgaacaatattcagtcaagcttacaccagacttcgacaacccaaaatggattggacgacacaagcacatgtttaattttcttgatgtcaaccacaatggaaggatctctcttgacgagatggtctacaaggcgtccgatattgttataaacaatcttggagcaacacctgaacaagccaaacgtcacaaagatgctgtagaagccttcttcggaggagctggaatgaaatacggtgtagaaactgaatggcctgaatacatcgaaggatggaaaagactggcttccgaggaattgaaaaggtattcaaaaaaccaaatcacacttattcgtttatggggtgatgcattgttcgatatcattgacaaagaccaaaatggagctatttcactggatgaatggaaagcatacaccaaatctgctggcatcatccaatcgtcagaagattgcgaggaaacattcagagtgtgcgatattgatgaaagtggacagctcgatgttgatgagatgacaagacaacatttaggattttggtacaccatggatcctgcttgcgaaaagctctacggtggagctgtcccctaagcttagctttcgttcgtatcatcggtttcgacaacgttcgtcaagttcaatgcatcagtttcattgcgcacacaccagaatcctactgagtttgagtattatggcattgggaaaactgtttttcttgtaccatttgttgtgcttgtaatttactgtgttttttattcggttttcgctatcgaactgtgaaatggaaatggatggagaagagttaatgaatgatatggtccttttgttcattctcaaattaatattatttgttttttctcttatttgttgtgtgttgaatttgaaattataagagatatgcaaacattttgttttgagtaaaaatgtgtcaaatcgtggcctctaatgaccgaagttaatatgaggagtaaaacacttgtagttgtaccattatgcttattcactaggcaacaaatatattttcagacctagaaaagctgcaaatgttactgaatacaagtatgtcctcttgtgttttagacatttatgaactttcctttatgtaattttccagaatccttgtcagattctaatcattgctttataattatagttatactcatggatttgtagttgagtatgaaaatattttttaatgcattttatgacttgccaattgattgacaacatgcatcaacgct

SEQ ID NO: 77 - protein, 249 aa, Arabidopsis thaliana
VVSEHGETAPNVVYQGKLENHMKIAIKRFSGTAWPDPRQFLEEARLVGQLRSKRMANLLGYCCEGGERLLVAEFMPNETLAKHLFHWDTEPMKWAMRLRVALYISEALEYCSNNGHTLYHDLNAYRVLFDEECNPRLSTFGLMKNSRDGKSYSTNLAFTPPEYLRTGRITAESVIYSFGTLLLDLLTGKHIPPSHALDLIRDRNLQTLTDSCLEGQFSDSDGTELVRLTSCCLQYEARERPNIKSLVTA

SEQ ID NO: 78 - protein, 263 aa, Arabidopsis thaliana
FSDSNVLSRGGRGCLYRACLDEKSSVTVKKLDGGGETDIEKQFETEVDWLAKIRHQNIVSLLGFCVYRQTSCIVYELMQNGSLESQLHGPSQGSGLTWQLRMKIAVDIARGLEYLHEHCHPPVVHRDLKSSSILLDSDFNAKISDFGFATVLTTQNKNLIHKASEDLLDGKVTDKNDVYSFGVILLELLLGKKSVEKPSSEPESIVTWAVPKLSDRANLPNILDPAIKGTMDLKHLYQVAAVAVLCVQPEPSYRPLITDVLHS

SEQ ID NO: 79 - protein, 277 aa, Arabidopsis thaliana
GSKSLIGEGSYGRAYYATLKDGKAVAVKKLDNAAEPESNVEFLTQVSRVSKLKHDNFVELFGYCVEGNFRILAYEFATMGSLHDILHGRKGVQGAQPGPTLDWIQRVRIAVDAARGLEYLHEKVQPAVIHRDIRSSNVLLFEDFKAKIADFNLSNQSPDMAARLHSTRVLGTFGYHAPEYAMTGQLTQKSDVYSFGVVLLELLTGRKPVDHTMPRGQQSLVTWATPRLSEDKVKQCVDPKLKGEYPPKAVAKLAAVAALCVQYESEFRPNMSIVVKA

SEQ ID NO: 80 - protein, 246 aa, Arabidopsis thaliana
ESGEKAPNLVYKGRLQNRRWIAVKKFTKMAWPEPKQFAEEAWGVGKLRHNRLANLIGYCCDGDERLLVAEFMPNDTLAKHLFHWENQTIEWAMRLRVGYYIAEALDYCSTEGRPLYHDLNAYRVLFDEDGDPRLSCFGLMKNSRDGKSYSTNLAYTPPEYLRNGRVTPESVTYSFGTVLLDLLSGKHIPPSHALDMIRGKNIILLMDSHLEGKFSTEEATVVVELASQCLQYEPRERPNTKDLVAT

SEQ ID NO: 81 - protein, 278 aa, Arabidopsis thaliana
FHPDTFLGEGGFGRVYKGRLDSTGQVVAVKQLDRNGLQGNREFLVEVLMLSLLHHPNLVNLIGYCADGDQRLLVYEFMPLGSLEDHLHDLPPDKEALDWNMRMKIAAGAAKGLEFLHDKANPPVIYRDFKSSNILLDEGFHPKLSDFGLAKLGPTGDKSHVSTRVMGTYGYCAPEYAMTGQLTVKSDVYSFGVVFLELITGRKAIDSEMPHGEQNLVAWARPLFNDRRKFIKLADPRLKGRFPTRALYQALAVASMCIQEQAATRPLIADVVTALSYL

SEQ ID NO: 82 - protein, 266 aa, Arabidopsis thaliana
FHQGNIVGIGGYSEVYRGDLWDGRRIAVKRLAKESGDMNKEKEFLTELGIISHVSHPNTALLLGCCVEKGLYLVFRFSENGTLYSALHENENGSLDWPVRYKIAVGVARGLHYLHKRCNHRIIHRDIKSSNVLLGPDYEPQITDFGLAKWLPNKWTHHAVIPVEGTFGYLAPESLMQGTIDEKTDIYAFGILLLEIITGRRPVNPTQKHILLWAKPAMETGNTSELVDPKLQDKYDDQQMNKLVLTASHCVQQSPILRPTMTQVLE

SEQ ID NO: 83 - protein, 276 aa, Arabidopsis thaliana
FSSVHQIGEGGFGTVFKGKLDDGTIVAIKRARKNNYGKSWLLEFKNEIYTLSKIEHMNLVKLYGFLEHGDEKVIVVEYVANGNLREHLDGLRGNRLEMAERLEIAIDVAHALTYLHTYTDSPIIHRDIKASNILITNKLRAKVADFGFARLVSEDLGATHISTQVKGSAGYVDPDYLRTFQLTDKSDVYSFGVLLVEILTGRRPIELKRPRKDRLTVKWALRRLKDDEAVLIMDPFLKRNRAAIEVAEKMLRLASECVTPTRATRPAMKGIAEKLW

SEQ ID NO: 84 - protein, 154 aa, Arabidopsis thaliana
NELGRGSFGFVYKAVLSDGIHVAVKRANAATIIHSNNRGFESELEILCKIRHNNIVNLLGYCSEMGERLLVYEYMPHGTLHDHLHGDLSQLDWSMRLKIMLQAARGLDYLHNEVDPPIIHRDVKTSNILLDGEMCARIADFGLVSSNERDSSNS

SEQ ID NO: 85 - protein, 238 aa, Oryza sativa
AEERKIGSGSFGSVYRAKLPDGREVAIKRAERPRAASGGGRRRRRRYDAERAFRAELRLLSRVNHRNLVQLLGFCEERGERILVFEFMPHGALHDHLHGRVDGHSPLFASWEARLRVALDAARGVEYLHCYAVPPIIHRDIKPSNILLDGEWTAKVSDFGLSLASSSSSSATATPPAACSTSSTAGTVGYIDPEYYRLQELTQRSDVYSFGVVLLELVTGRKAIHRQEGGSGSPRNVI

SEQ ID NO: 86 - protein, 147 aa, Medicago truncatula
KEFNELGRGSYGFVYKAALADGRIVAVKRANAATIIHTNNRDFEMELEILCKIRHVNIVNLLGYCAEMGERLLVYEYMSHGTLSDHIHGGLSPLNWSLRLKIAMQTAKGIEYLHKELLPPIVHKDLKSSNILLDSEWGARVSDFGLL

SEQ ID NO: 87 - protein, 146 aa, Solanum lycopersicum
KEFNELGRGSYGFVYKAVLPDGRQVAVKRANAATIIHTNSREFEMELEILCSVRHSNIVNLLGYCAEMGERILVYELMPHGTLNDHLHGGLSPVSWNLRLKIAMQAAKGIEYLHKEVSPPIVHRDVKSSNILLDADWGARIADFGL

SEQ ID NO: 88 - protein, 267 aa, Solanum lycopersicum
IANKIGQGGFGAVYYAELRGEKAAIKKMDMEATREFLAELKVLTNVHHLNLVRLIGYCVEGSLFLVYEYVENGHIGQHLRGTGRDPLPWSKRVQIALDSARGLEYIHEHTVPVYIHRDIKTANILIDKNFHAKVADFGLTKLTEVGSSSLQTRLVGTFGYMPPEYAQYGDVSPKVDVYAFGVVLYELISAKEAIVKPNGSVTESKGLVALFEEVLNQPDPDEDLRQLVDPRLGDDYPLDSVRKMAQLAKACTHENPLIRPSMRSIVV

SEQ ID NO: 89 - protein, 269 aa, Arabidopsis thaliana
NLLGQGGFGYVHKGILPSGKEVAVKQLKAGSGQGEREFQAEVEIISRVHHRHLVSLIGYCMAGVQRLLVYEFVPNNNLEFHLHGKGRPTMEWSTRLKIALGSAKGLSYLHEDCNPKIIHRDIKASNILIDFKFEAKVADFGLAKIASDTNTHVSTRVMGTFGYLAPEYAASGKLTEKSDVFSFGVVLLELITGRRPVDANNVYVDDSLVDWARPLLNRASEEGDFEGLADSKMGNEYDREEMARMVACAAACVRHSARRRPRMSQIVRA

SEQ ID NO: 90 - protein, 269 aa, Oryza sativa
DNVIGQGGFGCVYRGTLQDGTEVAIKKLKTESKQGDREFRAEVEIITRVHHRNLVSLVGFCISGNERLLVYEFVPNKTLDTHLHGNKGPPLDWQQRWKIAVGSARGLAYLHDDCSPKIIHRDVKASNILLDHDFEPKVADFGLAKYQPGNHTHVSTRIMGTFGYIAPEFLSSGKLTDKADVFAFGVVLLELITGRLPVQSSESYMDSTLVAWAKPLLSEATEEGNFDILVDPDIGDDYDENIMMRMIECAAAAVRQSAHLRPSMVQILK

SEQ ID NO: 91 - protein, 268 aa, Oryza sativa
LLGQGGFGYVHRGVLPTGKEIAVKQLKVGSGQGEREFQAEVEIISRVHHKHLVSLVGYCISGGKRLLVYEFVPNNTLEFHLHGKGRPTMEWPTRLKIALGAAKGLAYLHEDCHPKIIHRDIKASNILLDFKFESKVADFGLAKFTSDNNTHVSTRVMGTFGYLAPEYASSGKLTEKSDVFSYGVMLLELITGRRPVDTSQTYMDDSLVDWARPLLMQALENGNYEELVDPRLGKDFNPNEMARMIACAAACVRHSARRRPRMSQVVRA

SEQ ID NO: 92 - protein, 268 aa, Medicago truncatula
ENVIGEGGFGRVYKALMPDGRVGALKLLKAGSGQGEREFRAEVDTISRVHHRHLVSLIGYCIAEQQRVLIYEFVPNGNLDQHLHESQWNVLDWPKRMKIAIGAARGLAYLHEGCNPKIIHRDIKSSNILLDDSYEAQVADFGLARLTDDTNTHVSTRVMGTFGYMAPEYATSGKLTDRSDVFSFGVVLLELVTGRKPVDPTQPVGDESLVEWARPILLRAIETGDFSELADPRLHRQYIDSEMFRMIEAAAACIRHSAPKRPRMVQIA

SEQ ID NO: 93 - protein, 268 aa, Medicago truncatula
LLGQGGFGYVHRGILPNGKEVAVKQLKAGSGQGEREFQAEVEIISRVHHKHLVSLVGYCSTGFQRLLVYEFVPNNTLEFHLHGKGRPTMDWSTRLRIALGSAKGLAYLHEDCHPKIIHRDIKAANILLDFKFEAKVADFGLAKIASDLNTHVSTRVMGTFGYLAPEYAASGKLTDKSDVFSYGVMLLELLTGRRPVDKDQTYMDDSLVEWARPLLMRALEEDNLDSLIDPRLQNDFDPNEMTRMVACAAACTRHSAKRRPKMSQVVRA

SEQ ID NO: 94 - protein, 266 aa, Solanum lycopersicum
SNLLGQGGFGYVHKGILPNGKEIAVKSLKSNSGQGEREFQTEVETISRVNHRHLVPLVGYCIAGSQRMLVYDFIPNYTLEYHLHGSGNPVMNFPTRLKIATGTAKGFAYIHEDCHPRIIHRDIKGANILLDNNFEAKVADFGLAKLAADNFTHVSTRIMGTFGYLAPEYASTGKLTEKSDVYSYGVMLLELITGHRPTDVNSDGDNLVDWARPILNRAMEGGNYDELIDPRLEGKFDRQQMLCMVTCAAASIRHSSKRRPKMSQIV

SEQ ID NO: 95 - protein, 267 aa, Solanum lycopersicum
LLGQGGFGYVHKGILPNGKEVAVKQLKAGSGQGEREFQAEVEIISRVHHKHLVSLVGYCITGAQRLLVYEFVPNNTLEFHLHGKGRPPLDWPIRLKIALGSAKGLAYLHEDCQPKIIHRDIKAANILVDFNFEAKVADFGLAKLTSDVNTHVSTRVMGTFGYLAPEYASSGKLTEKSDVFSFGVMLLELITGRRPVDSTQSYIEDSLVDWARPLLTRALEDEKFDGLVDRRLENDYNHNEMARMVACCAACVRHSAKRRPRMTQVLR

SEQ ID NO: 96 - protein, 209 aa, Arabidopsis thaliana
SQKNFIGRGGFGFVYKGVLPDGSVIAVKKVIESEFQGDAEFRNEVEIISNLKHRNLVPLRGCSMVDDDSESQRYLVYDYMSNGNLDDHLFPRGETTKMPLSWPQRKSIILDVAKGLAYLHYGVKPAIYHRDIKGTNILLDVDMRARVADFGLAKQSREGESHLTTRVAGTHGYLAPEYALYGQLTEKSDVYSFGVVILEIMCGRKALDL

SEQ ID NO: 97 - protein, 198 aa, Oryza sativa
LVGRGGFGAVYCGVLADGSVVAVKKMLDPDVEGGDEEFTNEVEIISHLRHRNLVPLRGCCIVDDDAEEGKQKFLVYDFMPNGALEDFIFRDGKRPALTWAQRRSIIMDVAKGLEYLHYGVKPAIYHRDIKATNILLDGDMRARVADFGLARRSREGQSHLTTRVAGTHGYLAPEYALYGQLTEKSDVYSFGVLVLEVL

SEQ ID NO: 98 - protein, 217 aa, Medicago truncatula
SKNFIGRGGFGLVFKGTLADGSVVAVKRVLESDFQGDVEFCNEVEIISNLKHRNLLPLRGCCVVDENENYGDKGSQRYLVYDYMPNGNLEDHLFVSKDPQKANKSLSWPLRKNIILDVGKGLAYLHYGVKPAIYHRDIKATNILLDEDMRARVADFGLAKQSREGQSHLTTRVAGTHGYLAPEYALYGQLTEKSDVYSFGVVVLEIMCGRKALDLSS

SEQ ID NO: 99 - protein, 217 aa, Solanum lycopersicum
SQKNFVGRGGFGVVYKGTLADGTNVAVKKIIESDFQGNDEFCNEVEIISNLKHRNLVSLRGCCVTDKNRIENGESERFLVYDYMPNGNLEDHLFAVNQGGILKQPLTWPQRKNIILDVAKGLAYLHYGVKPAIYHRDIKATNILLDEDMRARVADFGLVKQSREGQSHLTTRVAGTHGYLAPEYALYGQLTEKSDVYSFGVVVLEIMCGRKVLDFSS

SEQ ID NO: 100 - protein, 271 aa, Arabidopsis thaliana
KASRIGEGVFGTVYKAPLGEQGRNLAVKKLVPSPILQNLEDFDREVRILAKAKHPNLVSIKGYFWTPDLHLLVSEYIPNGNLQSKLHEREPSTPPLSWDVRYKIILGTAKGLAYLHHTFRPTTIHFNLKPTNILLDEKNNPKISDFGLSRLLTTQDGNTMNNNRFQNALGYVAPELECQNLRVNEKCDVYGFGVLILELVTGRRPVEYGEDSFVILSDHVRVMLEQGNVLECIDPVMEEQYSEDEVLPVLKLALVCTSQIPSNRPTMAEIV

SEQ ID NO: 101 - protein, 272 aa, Oryza sativa
KATEIGRGVFGTVYRASVGEGRVVAIKKLATASIVESRDDFDREVRILGKARHPNLLPLKGYYWTPQLQLLITDYAPHGSLEARLHGNGDGAFPPLTWAERFRIVAGTARGLAHLHQSFRPPMIHYNVKPSNILLDEQCNPMVGDFGLARLLPKLDKHVMSSRFQGGMGYVAPELACQSLRINEKCDIYGFGVLILELVTGRRAVEYGDDDVVILIDQVRVLLDHGGGSNVLECVDPSIGEFPEEEVLPVLKLGMVCTSQIPSNRPSMAEVV

SEQ ID NO: 102 - protein, 271 aa, Medicago truncatula
KASEIGEGVFGTVFKVPLGSQQGRNVAIKKLITSNILQYPEDFDREVRILGNARHPNLIALKGYYWTPQLQLLVSEFAPNGNLQSKLHEKLPSSPPLSWPNRFKILLGTAKGLAHLHHSFRPPIIHYNIKPSNILLDENFNAKISDFGLARLLTKLDKHVMSNRFQSALGYVAPELACQSLRVNEKCDVYGFGVMILEIVTGRRPVEYGEDNVLILNDHVRVLLEHGNALECVDPSLMNEYPEDEVLPVLKLAMVCTSQIPSSRPTMAEVV

SEQ ID NO: 103 - protein, 271 aa, Solanum lycopersicum
KASQIGEGVFGTVYKAPLGGEGRIVAVKKLVTSKILQYPEDFDREVRVLAKARHPNLISLKGYYWTPQLQLLVSDYAPEGSLQAILHERPSSSTSLPLSWSTRFNIVLGTAKGLAHLHHAFRPAIIHYNIKPSNILLDENFNPRISDFGLARLVTKLDKHMISSRFQSALGYVAPELACQSLRVNEKCDVYGFGMLILEIVTGRRPVEYGEDNVLILNDHVRVLLEQGNVLECVDPTMNTYPEEEVLPVLKLALVCTSQIPSSRPSMAEVV

SEQ ID NO: 104 - protein, 271 aa, Arabidopsis thaliana
FAEVVGRGGFGIVYKGTLSDGRVVAVKVLKDTKGNGEDFINEVATMSRTSHLNIVSLLGFCSEGSKRAIIYEFLENGSLDKFILGKTSVNMDWTALYRIALGVAHGLEYLHHSCKTRIVHFDIKPQNVLLDDSFCPKVSDFGLAKLCEKKESILSMLDTRGTIGYIAPEMISRVYGNVSHKSDVYSYGMLVLEIIGARNKEKANQACASNTSSMYFPEWVYRDLESCKSGRHIEDGINSEEDELAKKMTLVGLWCIQPSPVDRPAMNRVVE

SEQ ID NO: 105 - protein, 264 aa, Arabidopsis thaliana
TVIGQGGFGTVYKAEFNDGLIAAVKKMNKVSEQAEQDFCREIGLLAKLHHRNLVALKGFCINKKERFLVYDYMKNGSLKDHLHAIGKPPPSWGTRMKIAIDVANALEYLHFYCDPPLCHRDIKSSNILLDENFVAKLSDFGLAHSSRDGSVCFEPVNTDIRGTPGYVDPEYVVTQELTEKSDVYSYGVVLLELITGRRAVDEGRNLVEMSQRFLLAKSKHLELVDPRIKDSINDAGGKQLDAVVTVVRLCTEKEGRSRPSIKQV

SEQ ID NO: 106 - protein, 289 aa, Medicago truncatula
LASLEKIGQGGCGEVYKAELPGSNGKMIAIKKIIQPPKDAAELAEEDSKLLHKKMRQIKSEIDTVGQIRHRNLLPLLAHISRPDCHYLVYEFMKNGSLQDMLHKVERGEAELDWLARHKIALGIAAGLEYLHTSHSPRIIHRDLKPANVLLDDEMEARIADFGLAKAMPDAQTHITTSNVAGTVGYIAPEYHQILKFNDKCDIYSFGVMLGVLVIGKLPSDDFFTNTDEMSLVKWMRNVMTSENPKEAIDARLLGNGFEEQMLLVLKIASFCTMDNPKERPDAKNVRIM

SEQ ID NO: 107 - protein, 266 aa, Arabidopsis thaliana
RILGQGGQGTVYKGILPDNSIVAIKKARLGDSSQVEQFINEVLVLSQINHRNVVKLLGCCLETEVPLLVYEFITNGTLFDHLHGSMIDSSLTWEHRLKIAIEVAGTLAYLHSSASIPIIHRDIKTANILLDVNLTAKVADFGASRLIPMDKEELETMVQGTLGYLDPEYYNTGLLNEKSDVYSFGVVLMELLSGQKALCFKRPQSSKHLVSYFATATKENRLDEIIGGEVMNEDNLKEIQEAARIAAECTRLMGEERPRMKEVAAK

SEQ ID NO: 108 - protein, 263 aa, Oryza sativa
SDDRIVGRGGYGTVYKGILSDQTIVAIKKSKLVDQSQMEQFINELIVLSQIDHKNVVKILGCCLETEVPLLVYEFISNGALFHQLHNTNLVPISWEHRLRIATETASALANLHLARKVPIIHRDVKSANILIDENYTAKVSDFGASRLVPSNQTHVTTLVQGTLGYLDPEYFYTSQLTDKSDVYSFGVVLVELLTRQKPISYHRQEEGINLASHFTALAQQNRLQEIVDCVVVKEAGMRHVNVVSHLILKCLKLKGEERPRMV

SEQ ID NO: 109 - protein, 262 aa, Oryza sativa
SDDNIIGRGGFGIVYKGILSNQMVVAIKKAQRVDQNQMEQFINELVILSQVNHKNVVQLLGCCLETELPLLVYEFITNGALFSHLQNTSVLISWEDRLRIAVETASALAYLHLATKEPIIHRDVKSSNILLDENFTAKVSDFGASRPIPHNQTHVTTLVQGTLGYMDPEYFQTSQLTEKSDVYSFGVVLIELLTRQKPISDGRTDDVRNLACHFSMLFYQNQLLEIVDSQVAEEAGTKHVKTVAQLALRCLRSRGEERPRMI

SEQ ID NO: 110 - protein, 262 aa, Medicago truncatula
GKGGFGTVYKGELDDNRIVAIKKSKTIDKSQIEQFINEVDVVSQINHRNVVKLLGCCLETEVPLLVYEFVSNGTLSEFIHTKGKTNDPTWKTRLKIAAEVAEALSYLHSYASTPIIHRDVKSDNILLDGTNTAKVSDFGASRLVPLDQTEIATMVQGTIGYLDPEYMQTSQLTEKSDVYSFGVVLVELLTGEKPFCFGRPEERRSLAMHFLSCLKKDNVFEVIQDGLWNEENKQEIKEVAVLAAKCLRLRGEERPSMKEVAM

SEQ ID NO: 111 - protein, 267 aa, Medicago truncatula
YEESLIIGRGGFGTVYKGILADNRIVAIKKSKIMDATQVEQFINEVVVLSQINHRNVVKLLGCCLETQVPLLVYEFISNGTLFDLMHTSIEKENNAIWKTRLRIAAEIAGALSYLHSSASLPIIHRDVKSANILLDDNYTAKVSDFGASRLVPLDHTMIATVVQGTLGYLDPEYMQTHQLTEKSDVYSFGVVLAELLTGEKPISFNRPEENRSLAIHFLSCLRENHVSEVLQVGILNDENKEEIKEVAILAARCLRLKGEERPSMKE

SEQ ID NO: 112 - protein, 267 aa, Medicago truncatula
SKELGEGGFGTVYFGKLHDGRSVAVKRLYENNYRRVEQFMNEVRILARLVHPNLVSLYGCTSRHSRELLLVYEYVSNGTVADHLHGKKAKHGKLSWHVRMNIAVETASALKYLHVSDIIHRDIKTNNILLDAHFRVKVADFGLSRLFPNDQTHVSTAPQGTPGYVDPEYHECYQLTDRSDVYSFGVVMIELISSLPAVDITRHRHEINLSNMAINRIQNRTLHEIVDPTLGFESDPKVKKMIHAMAELAFQCLQSSKDMRPSMDEVL

SEQ ID NO: 113 - protein, 288 aa, Oryza sativa
APTNLLGSGSFGSVYKGKLNIQDHVAVKVLKLENPKALKSFTAECEALRNMRHRNLVKIVTICSSIDNRGNDFKAIVYDFMPNGSLEDWIHPETNDQADQRHLNLHRRVTILLDVACALDYLHRHGPEPVVHCDIKSSNVLLDSDMVAHVGDFGLARILVDGTSLIQQSTSSMGFIGTIGYAAPEYGVGLIASTHGDIYSYGILVLEIVTGKRPTDSTFRPDLGLRQYVELGLHGRVTDVVDTKLILDSENWLNSTNNSPCRRITECIVWLLRLGLSCSQELPSSRTP

SEQ ID NO: 114 - protein, 268 aa, Solanum lycopersicum
DRVVGQGGFGIVYKGYLKDNCIIAVKKSKVIDRNQIEQFINEVLVLSQINHRNVVKLLGCCLETEVPLLVYEFINNGTLSEHLHHKLKASNLSLDIRLRVAAEAAGVLSYLHSAAYPPIIHRDIKSVNILLDKSYTAKVSDFGASRLVPADQTELSTLVQGTLGYLDPEYLQTNELNEKSDVYSFGVVLVELLTGRKALCFERPPEERSLAQYFISSVEKGLLLDILDDNIVYDETNEGKLKNVVMLAQKCLNVKGDERPTMKEVAAE

SEQ ID NO: 115 - protein, 267 aa, Solanum lycopersicum
YAEDRILGRGGYGTVYKGVLPDKRVVAIKKSRTMDVSQIELFINEVIILSEVNHRNVVKLLGCCLESEVPLLVYEYISKGTLYYHIHDGGDQTRWFSWENRLRIASEAAGALAYLHSAASTPVIHRDVKSTNILLDENYTAKISDFGASRLVSLDQTQVTTLVQGTLGYLDPEYFHTSQLTEKSDVYSFGVVLAELLTGRMPLDTTASEKERNLAAFFVRSIKENRLFQVLETRVLREGSFEQCQGVAELAKRCLRLTSEERPTMKE

SEQ ID NO: 116 - protein, 269 aa, Arabidopsis thaliana
SKELGDGGFGTVYYGKLKDGRSVAVKRLYDNNFKRAEQFRNEVEILTGLRHPNLVALFGCSSKQSRDLLLVYEYVANGTLADHLHGPQANPSSLPWSIRLKIAVETASALKYLHASKIIHRDVKSNNILLDQNFNVKVADFGLSRLFPMDKTHVSTAPQGTPGYVDPDYHLCYQLSNKSDVYSFAVVLMELISSLPAVDITRPRQEINLSNMAVVKIQNHELRDMVDPSLGFDTDTRVRQTVIAVAELAFQCLQSDKDLRPCMSHVQDT

SEQ ID NO: 117 - protein, 270 aa, Arabidopsis thaliana
FSKELGDGGFGTVYYGTLKDGRAVAVKRLFERSLKRVEQFKNEIDILKSLKHPNLVILYGCTTRHSRELLLVYEYISNGTLAEHLHGNQAQSRPICWPARLQIAIETASALSYLHASGIIHRDVKTTNILLDSNYQVKVADFGLSRLFPMDQTHISTAPQGTPGYVDPEYYQCYRLNEKSDVYSFGVVLSELISSKEAVDITRHRHDINLANMAISKIQNDAVHELADLSLGFARDPSVKKMMSSVAELAFRCLQQERDVRPSMDEIVEV

SEQ ID NO: 118 - protein, 266 aa, Solanum lycopersicum
SNKIGKGGFGQVYKGKLPDGRAVAVKVLTETNGDGEDYINEVASISRTSHVNIVGLLGFCYQRNRRALIYEYVSNGSLDKFLNSGPSSTTCSLKWTTLYSIAVGTARGLEYLHRGCNTRIVHFDIKPHNILLDQDFCPKISDFGLSRLCEKKESILSMLGARGTAGYIAPEVFSRAFGHVSHKSDVYSYGMLVLEMVGVRNNVNMSQTSEVYFPNWIYEHLELGKDLSLQGIMNEEDEEVARKMILVGLWCIQTKPSDRPAIEKAV

SEQ ID NO: 119 - protein, 268 aa, Medicago truncatula
DKLGHGGYGVVYKASLTDGRQVAVKVINESKGNGEEFINEVASISRTSHLNIVSLLGFCYEVNKRALIYEYMPKGSLDKFIYKSGFPDAVCDFDWNTLFQVAIGIARGLEYLHQGCSSRILHLDIKPQNILLDEDFCPKISDFGLAKICQRKDSIVSILGTRGTIGYMAPEVFSRAFGGVSYKSDVYSYGMLILEMIGGRKNYDTGGSCTSEMYFPDWIYKDLEQGNHTVLNGLTISTEENDMVRKITMVSLWCIQTNPSDRPPMNKV

SEQ ID NO: 120 - protein, 269 aa, Solanum lycopersicum
DSSKELGEGGFGTVYKGKLLDGRVVAVKRLYENNYKRVEQFRNEIEILTRLRHRNLVTLYGCTSRHGRELLLVYEYISNGTVADHLHGEFSKPGSLSWNTRMSISIETASALAFLHNSEVIHRDVKTNNILLDSNFCVKVADFGLSRLFPTDVTHVSTAPQGTPGYVDPQYHECYQLTSKSDVYSFGVVLIELISSLPAVDICRHRQEINLSNMAINKIQSNTLHELVDSNLGFDSNDMVKLMITAVAELAFQCLQNDRDLRPSMPEVL

SEQ ID NO: 121 - protein, 273 aa, Arabidopsis thaliana
FAEVVGRGGFGIVYRGTLCDGRMVAVKVLKESKGNNSEDFINEVSSMSQTSHVNIVSLLGFCSEGSRRAIIYEFLENGSLDKFISEKTSVILDLTALYGIALGVARGLEYLHYGCKTRIVHFDIKPQNVLLDDNLSPKVSDFGLAKLCEKKESVMSLMDTRGTIGYIAPEMISRVYGSVSHKSDVYSYGMLVFEMIGARKKERFGQNSANGSSMYFPEWIYKDLEKADNGDLEHIEIGISSEEEEIAKKMTLVGLWCIQSSPSDRPPMNKVVE

SEQ ID NO: 122 - protein, 269 aa, Oryza sativa
FAEKLGHGGFGAVYRGNLSDGRQVAVKMLKDSKGDGEEFINEVASISRTSHVNVVTLLGFCLHRSKRALIYEYMPNGSLERYAFRNNSKGELSLTWEKLFDVAVGIARGLEYLHRGCSTRIVHFDIKPHNILLDQEFCPKISDFGMAKLCANKESIVSIAGARGTIGYIAPEVYSKQFGAISSKSDVYSYGMMILEMVGARERNIEANSESSSHYFPQWIYEHLDEYCISSSEIDGETTELVRKMVVVALWCIQVVPTNRPTMTRVVEM

SEQ ID NO: 123 - protein, 270 aa, Arabidopsis thaliana
TSNKLGEGGFGAVYKGKLSNGTDVAVKRLSKKSGQGTREFRNEAVLVTKLQHRNLVRLLGFCLEREEQILIYEFVHNKSLDYFLFDPEKQSQLDWTRRYKIIGGIARGILYLHQDSRLKIIHRDLKASNILLDADMNPKIADFGLATIFGVEQTQGNTNRIAGTYAYMSPEYAMHGQYSMKSDIYSFGVLVLEIISGKKNSGVYQMDETSTAGNLVTYASRLWRNKSPLELVDPTFGRNYQSNEVTRCIHIALLCVQENPEDRPMLSTII

SEQ ID NO: 124 - protein, 266 aa, Medicago truncatula
ANKLGEGGFGEVYKGSLPSGQEIAVKRLSKHSGQGGEQFKNEVELVAQLQHRNLARLLGFCLEREEKILVYEFVANKSLDYILFDPEKQRLLDWTRRYKIIGGIARGIQYLHEDSRLKIIHRDLKASNILLDGDMNPKISDFGMAKLFGVDQTQGNTSRIVGTYGYMSPEYAMHGEFSIKSDVYSFGVLVMEIISGKKSNSFYETGVADDLVTYAWKLWKNGTPLELVDHTVRESYTPNEAIRCIHIGLLCVQEDPEDRPTMATVV

SEQ ID NO: 125 - protein, 266 aa, Solanum lycopersicum
DNKLGQGGFGPVYKGKLSNGQEVAVKRLSADSGQGDLEFKNEVMLVAKLQHRNLVRLLGFCFDGTERLLIYEFVPNASLDQFLFDPVKRRQLDWERRSKIIGGVAKGILYLHEDSRLRIIHRDLKASNVLLDEEMNPKIADFGMARLFTLDETQGNTSRIVGTYGYMAPEYAMHGQFSVKSDVFSFGVLVLEILSGHKNTCFRNGESVEDLLSYAWTNWQEGTAANLIDPMFRGSSGLVRDIKRYVHIALLCVQENIGDRPTMAAV

SEQ ID NO: 126 - protein, 266 aa, Oryza sativa
RNKLGEGGFGAVYKGTLPDGDEIAVKRLSKSSAQGVGELKNELALVAKLQHKNLVRLVGVCLEQEERLLVYEFVPNRSLDQILFDADKRQQLDWGKRYKIINGIARGLQYLHEDSQLKVVHRDLKASNILLDMNMNPKISDFGLARLFGRDQTQGVTNLVIGTYGYMSPEYAMRGNYSLKSDVFSFGVMVLEIVTGKKNNDCYNSLQSEDLLTLVWEQWTARAVSEAVDPVMGGGFSWSDVMRCIHIGLLCVQENPADRPVMSSVV

SEQ ID NO: 127 - protein, 268 aa, Oryza sativa
ASRELGDGGFGTVYKGKLRDGRVVAVKRLYKNNYRRVEQFLNEVDILSRLLHQNLVILYGCTSRSSRDLLLVYEYIPNGTVADHLHGPRAGERGLTWPVRMTIAIETAEALAYLHAVEIIHRDVKTNNILLDNNFHVKVADFGLSRLFPLEVTHVSTVPQGTPGYVDPVYHQCYKLTDKSDVYSFGVVLIELISSKPAVDMSRSHSDINLANMALNRIQNHEVDQLVDPEIGYETDSETKRMVDLVAELAFQCLQMDRESRPPIKEVV

SEQ ID NO: 128 - protein, 254 aa, Arabidopsis thaliana
SDGTKVAVKRLKRSSFQRKKEFYSEIRRAAKLYHPNVVAIKGCCYDHGERFIVYEFIASGPLDRWLHHVPRGGRSLDWNMRLNIATTLAQGIAFLHDKVKPQVVHRDIRASNVLLDEEFGAHLMGVGLSKFVPWEVMQERTVMAGGTYGYLAPEYVYRNELTTKSDVYSFGVLLLEIVSGRRPTQAVNSSVGWQSIFEWATPLVQANRWLEILDPVITCGLPEACVVQKVVDLVYSCTQNVPSMRPRMSHVVHQ

SEQ ID NO: 129 - protein, 249 aa, Oryza sativa
GSRVAIKRLKRSSLQRKKDFYSEIGRVAKLYHPNLVAVKGCCYDHGDRFIVYEFVANGPLDVWLHHVPRGGRCLDWPMRMRVATTLAQGIAFLHDKVKPQVVHRDIRASNVLLDEEFGSHLMGVGLSKFVPWEVMHERTVKAATYGYLAPEFIYRNELTTKSDVYSFGVLLLEIISGRRPTQSVESVGWQTIFEWATPLVQSHRYLELLDPLIQELPDVGVIQKVVDLVYACTQHVPSVRPRMSHVVHQ

SEQ ID NO: 130 - protein, 258 aa, Medicago truncatula
QPDGSKVAVKRLKRASFKRKKEFYSEIGRVARLRHPNLVVVMGCCYDHGDRYIVYEFVANGPLDKWLHHIPRGGRSLDWAMRMKIATTLAQGIAFLHDKVKPQVVHRDIRASNVLLDEEFGAHLMGVGLSKFVPYEAMHERTVMAGGTYGYLAPEFVYRNELTTKSDVYSFGVLLLEIVSGRRPAQAVDSVGWQSIFEWATPLVQDHRYPELLDPYISSSSTSIIPETSTIQKVVDLVYSCTQHVPSMRPRMSHVVHQ

SEQ ID NO: 131 - protein, 272 aa, Solanum lycopersicum
LLGDAKTGGTYSGLLPDGSRVAVKRLKRCGIQRKKEFYSEIGRVARLHHSNLVSIKGCCYHHGDRYILYEFIINGPLDRWLHHIPRGGRSLDWSMRMKVATTLAQGIAFLHDKMKPQVVHRDIRASNVLLDEEFGAHLMGVGLSKFVPWEIMHERRVMAGGTHGYLAPEFVYRNELTTKSDVYSFGVLLLEIISGRRPAQAVDSVGWQSIFEWATPLVQAHRYVELLDPLISSSSSSQIPEVGVIQKVVDLVYSCTQHVPSMRPRMSHVVHQ

SEQ ID NO: 132 - protein, 272 aa, Arabidopsis thaliana
ESASILGEGGFGKVYRGILADGTAVAIKKLTSGGPQGDKEFQVEIDMLSRLHHRNLVKLVGYYSSRDSSQHLLCYELVPNGSLEAWLHGPLGLNCPLDWDTRMKIALDAARGLAYLHEDSQPSVIHRDFKASNILLENNFNAKVADFGLAKQAPEGRGNHLSTRVMGTFGYVAPEYAMTGHLLVKSDVYSYGVVLLELLTGRKPVDMSQPSGQENLVTWTRPVLRDKDRLEELVDSRLEGKYPKEDFIRVCTIAAACVAPEASQRPTMGEVV

SEQ ID NO: 133 - protein, 271 aa, Arabidopsis thaliana
SRVLGEGGFGRVYEGVFDDGTKVAVKVLKRDDQQGSREFLAEVEMLSRLHHRNLVNLIGICIEDRNRSLVYELIPNGSVESHLHGIDKASSPLDWDARLKIALGAARGLAYLHEDSSPRVIHRDFKSSNILLENDFTPKVSDFGLARNALDDEDNRHISTRVMGTFGYVAPEYAMTGHLLVKSDVYSYGVVLLELLTGRKPVDMSQPPGQENLVSWTRPFLTSAEGLAAIIDQSLGPEISFDSIAKVAAIASMCVQPEVSHRPFMGEVVQA

SEQ ID NO: 134 - protein, 271 aa, Oryza sativa
SMLGEGGFGRVFKGVLTDGTAVAIKKLTSGGHQGDKEFLVEVEMLSRLHHRNLVKLIGYYSNRESSQNLLCYELVPNGSLEAWLHGTLGASRPLDWDTRMRIALDAARGLAYLHEDSQPCVIHRDFKASNILLEDDFHAKVSDFGLAKQAPEGCTNYLSTRVMGTFGYVAPEYAMTGHLLVKSDVYSYGVVLLELLTGRRPVDMSQPSGQENLVTWARPILRDKDTLEELADPKLGGQYPKDDFVRVCTIAAACVSPEASQRPTMGEVVQS

SEQ ID NO: 135 - protein, 269 aa, Oryza sativa
SRIIGEGGFGRVYEGILEDGERVAVKILKRDDQQVTREFLAELEMLSRLHHRNLVKLIGICTEEHIRCLVYELVPNGSVESHLHGSDKGTAPLDWDARLKIALGAARALAYLHEDSSPRVIHRDFKSSNILLEHDFTPKVSDFGLARTAIGEGNEHISTRVMGTFGYVAPEYAMTGHLLVKSDVYSYGVVLLELLTGRKPVDILRPPGQENLVAWACPFLTSRDGLETIIDPSLGNSILFDSIAKVAAIASMCVQPEVDQRPFMGEVVQ

SEQ ID NO: 136 - protein, 272 aa, Oryza sativa
HVVGQGSFGAVYRGVLPDGRKVAVKLMDRPGKQGEEEFEMEVELLSRLRSPYLLGLIGHCSEGGHRLLVYEFMANGGLQEHLYPNGGSCGGISKLDWPTRMRIALEAAKGLEYLHERVNPPVIHRDFKSSNILLDKDFRARVSDFGLAKLGSDRAGGHVSTRVLGTQGYVAPEYALTGHLTTKSDVYSYGVVLLELLTGRVPVDMKRPPGEGVLVNWALPMLTDREKVVQILDPALEGQYSLKDAVQVAAIAAMCVQQEADYRPLMADVVQS

SEQ ID NO: 137 - protein, 274 aa, Oryza sativa
NVVGRGAYGVVFRGRLGDGTTAAIKRLKMDGRREGEREFRIEVDLLSRMHSPYLVGLLGYCADQSHRLLVFEFMPNGSLKSHLHRRALAPAEQPPPLDWQTRLGIALDCARALEFLHEHSSPAVIHRDFKCSNILLDHNYRARVSDFGMAKLGSNKANGQVTTRVLGTTGYLAPEYASTGKLTTKSDVYSYGVVLLELLTGRVPVDTKRPPGQHVLVSWALPRLTNREKLVQMVDPALIGQFSLKDLVQVAAITAMCIQTKADYRPLMTDVVQS

SEQ ID NO: 138 - protein, 269 aa, Medicago truncatula
EIGNGGINGLMYKGVLSDGTLAAIKLLQSEGKQGERAFRIEVDLLSQLRSPYLVELLGYCADQHHRLLIFEYMPNGTLQHHLHSLNDKTQPLDWWSRMRIALDCARALEFLHEHAVSPVIHRDFKTYNVLLDQNFRAKVADFGLANMGSEKRNGQVSTRVLGTTGYLAPEYASTGKLTTKSDVYSYGVVLLELLTGRVPVDIKRPTGEHVLVSWALPRLTNREKVVEMVDPVLHGQYSKKALVQVAAIAAMCIQPEADYRPLMTDVVQS

SEQ ID NO: 139 - protein, 274 aa, Medicago truncatula
FHPSRILGEGGFGLVYSGNLEDGSKVAFKVLKREDHHGDREFLSEVEMLSRLHHRNLVKLIGICTELSFRCLVYELIPNGSVESHLHGVDREKSPLDWSARIKIALGAARGLAYLHEDSSPHVIHRDFKSSNILLENDFTPKVSDFGLARTAADEDNRHISTRVMGTFGYVAPEYAMTGHLLVKSDVYSYGVVLLELLTGRKPVDFSQPPGQENLVAWARPLLTSREGLEVIIDPSLGSNVPFDSVAKVAAIASMCVQPEVSDRPFMGEVVQAL

SEQ ID NO: 140 - protein, 211 aa, Medicago truncatula
SKSNIVGHGGFGLVYRGVLNDGRKVAIKLMDQAGKQGEEEFKVEVELLSRLHSPYLLALLGYCSDHNHKLLVYEFMANGGLQEHLYPVSNSNSSVMSVNLDWETRLRIALEAAKGLEYLHEHVSPPVIHRDFKSSNILLDKKFHAKVSDFGLAKLGPDRIGGHVSTRVLGTQGYVAPEYALTGHLTTKSDVYSYGVVLLELLTGRVPVDMK

SEQ ID NO: 141 - protein, 272 aa, Medicago truncatula
ESASVLGEGGFGKVFKGILSDGTSVAIKRLTNGGQQGDKEFLAEVEMLSRLHHRNLVKLVGYYSNRESSQNLLCYELVPNGSLEAWLHGPMGINCPLDWDTRMKIALDAARGLSYLHEDSQPCVIHRDFKASNILLENNFHAKVADFGLAKQAPEGGANYLSTRVMGTFGYVAPEYAMTGHLLVKSDVYSYGVVLLELLTGRTPVDMSQPGGQENLVTWARPILRDKDRLDEIADPKLEGKYPKEDFVRVCTIAAACVAPEANQRPTMGEVV

SEQ ID NO: 142 - protein, 270 aa, Solanum lycopersicum
ILGEGGFGRVYKGVLSDGTAVAIKRLTSGGQQGGKEFLVEVEMLSRLHHRNLVKLVGYYSSRESSQNLLCYELVSNGSLEAWLHGHLGLNCPLDWDTRMKIALDAARGLAYLHEDSQPCVIHRDFKASNILLENNFHAKVADFGLAKQAPEGQANYLSTRVMGTFGYVAPEYAMTGHLLVKSDVYSYGVVLLELLTGRRPVDMAQPSGQENLVTWARPILRDKDRLEELADPRLEGKYPKEDFVRVCTIAAACVAPEASQRPTMGEVVQS

SEQ ID NO: 143 - protein, 270 aa, Solanum lycopersicum
ARVLGEGGFGRVYSGVLDDGVKVAVKVLKRDDQQGGREFLAEVEMLSRLHHRNLVKLIGICLEERSRCLLYELIPNGSVESHLHGVDKESSPLDWDARMKIALGAARGLAYLHEDSSPRVIHRDFKSSNILLEHDFTPKVSDFGLARAALDEGERHISTRVMGTFGYVAPEYAMTGHLLVKSDVYSYGVVLLELLTGKKPVDMSQPPGQENLVAWARPLLTSEEGLELIMDRNLGPDFPFDDIVKVAAIASMCVQPEVSHRPFMGEVVQA

SEQ ID NO: 144 - protein, 273 aa, Solanum lycopersicum
SNVIGNGAFGSVYRGVLQDGRKVAIKLMDQAGKQGEEEFKVEVELLCRLRSPYLLSLIGYCSESSHKLLVYEFMANGGLQEHLYPIKGSNNFCPKLDWKTRLRIALEAAKGLEYLHEHVNPPVIHRDLKSSNILLDKNFHAKVSDFGLAKLGSDKAGGHVSTRVLGTQGYVAPEYALTGHLTTKSDVYSYGVVLLELLTGRVPVDMKRSPGEGVLVSWALPRLTDREKVVEIMDPALEGQYSMKEVVQVAAIAAMCVQPEADYRPLMADVVQS

SEQ ID NO: 145 - protein, 271 aa, Arabidopsis thaliana
NDNKLGQGGFGIVYKGRLLDGKEIAVKRLSKMSSQGTDEFMNEVRLIAKLQHINLVRLLGCCVDKGEKMLIYEYLENLSLDSHLFDQTRSSNLNWQKRFDIINGIARGLLYLHQDSRCRIIHRDLKASNVLLDKNMTPKISDFGMARIFGREETEANTRRVVGTYGYMSPEYAMDGIFSMKSDVFSFGVLLLEIISGKRNKGFYNSNRDLNLLGFVWRHWKEGNELEIVDPINIDSLSSKFPTHEILRCIQIGLLCVQERAEDRPVMSSVM

SEQ ID NO: 146 - protein, 124 aa, Arabidopsis thaliana
ENELVAVKEVEATLTEERKFRSSASKIGTMHHKNLANLEGYCCELGRRFLVYEYAKNGSILDHIVDPLRSKKLTWRIRTDTCLSVAKALCYLHMECREFVSHGNLNCGNILLGEDLEAKLTEYG

SEQ ID NO: 147 - protein, 196 aa, Arabidopsis thaliana
DKVGHGGFGAVFKGTLPGSSTFVAVKRLERPGSGESEFRAEVCTIGNIQHVNLVRLRGFCSENLHRLLVYDYMPQGSLSSYLSRTSPKLLSWETRFRIALGTAKGIAYLHEGCRDCIIHCDIKPENILLDSDYNAKVSDFGLAKLLGRDFSRVLATMRGTWGYVAPEWISGLPITTKADVYSFGMTLLELIGGRRN

SEQ ID NO: 148 - protein, 266 aa, Oryza sativa
SERLGKGSFGPVFKGTLPDGTLIAVKKLDGVSQGEKQFRAEVSTIGTIQHVNLIRLLGFCSERSMKMLVYEFMPNGSLDRYLFGSTPLTLSWKTRYQIALGIAKGLAYLHEKCRSLIIHCDIKPENVLLGADFMPKIADFGLAKLLGRDFSRVLTTMRGTIGYLAPEWISGTAITTKADVFSYGMMLFEIISGNRNADWHRQGEQGAGTFFPVLVAMRLPEGKIQDLLGSELSADANLEEVERACKVACWCIQDDENTRPTMGEIV

SEQ ID NO: 149 - protein, 269 aa, Oryza sativa
ADNKLGQGGFGPVYMGRLDNGQDIAVKRLSRRSTQGLREFKNEVKLIAKLQHRNLVRLLGCCIDGSERMLIYEYMHNRSLNTFLFNEEKQSILNWSKRFNIINGIARGILYLHQDSALRIIHRDLKASNILLDRDMNPKISDFGVARIFGTDQTSAYTKKVVGTYGYMSPEYAMDGVFSMKSDVFSFGVLVLEIVSGKKNRGFYHNELDLNLLRYAWRLWKEGRSLEFLDQSIAGTSSNVTEVLRCIQIGLLCVQEQPRHRPTMSAVTM

SEQ ID NO: 150 - protein, 263 aa, Oryza sativa
SEKLGGGAFGTVFKGKLPDSTAIAVKRLDGLSQGEKQFRAEVSTIGTIQHVNLVRLLGFCSEGSRRLLVYEYMPKGSLELQLFHGETTALNWAIRYQIALGTARGLNYLHEKCRDCIIHCDVKPDNILLDESFVPKVSDFGLAKLLGRDFSRVLTTMRGTRGYLAPEWISGVPITPKADVFSYGMMLFELISGRRNADLGEEGKSSFFPTLAVNKLQEGDVQTLLDPRLNGDASADELTKACKVACWCIQDDENGRPTMGQVV

SEQ ID NO: 151 - protein, 262 aa, Medicago truncatula
DRLGGGGFGSVFKGTLPDSSVIAVKKLESISQGEKQFRTEVSTIGTVQHVNLVRLRGFCSEGDKRLLVYDYMPNGSLDSHLFQNSKVLEWKVRYQIALGIARGLTYLHEKCRDCIIHCDVKPENILIDSDFCPKVADFGLAKLVGRDFSRVLTTMRGTRGYLAPEWISGVAITAKADVYSYGMMLFELVSGRRNSDPSEDGHVRFFPTLAANLVHQGGNVISLLDSRLEGDADAEEITKVIKIASWCVQDDEAHRPSMGQVV

SEQ ID NO: 152 - protein, 266 aa, Medicago truncatula
ENKLGQGGFGIVYKGRLIEGQEIAVKRLSKNSGQGVDEFKNEVRLIVKLQHRNLVRLLGCSFQMDEKMLVYEYMENRSLDAILFDKAKRFSLDWQTRFNIISGIARGLLYLHQDSRFRIIHRDLKASNILLDGEMNPKISDFGMARIFGTDQTEANTVRVVGTYGYMSPEYAMDGIFSVKSDVFSFGVLVMEIISGKKNRGFYSANKELNLLGHSWKLWNEGNALELIDSSIVNSYSPAEVFRCIQVGLLCVQERAEDRPTMSSVV

SEQ ID NO: 153 - protein, 121 aa, Medicago truncatula
MAIKDLNATIEERKFRSAVLKIGSIHHKNLVKLEGYCCEFNHRYLVYEYAKNGSLEKHLDDSSLCKRLTWRKRVEICSSVAKAICYLHSGCREFLSHGNLKCENVMLDEDSIAKLSEYGFA

SEQ ID NO: 154 - protein, 272 aa, Medicago truncatula
SEKLGHGGFGTVFQGELSDSTVVAVKRLERPGGGEKEFRAEVSTIGNIQHVNLVRLRGFCSENAHRLLVYEYMPNGALSAYLRKEGPCLSWDVRLRVAIGTAKGIAYLHEECRSCIIHCDIKPENILLDSDFTAKVSDFGLAKLIGRDFSRVLATRRGTLGYVAPEWISGVEITTKADVYSYGMTLLELVGGRRNVEAPPSSGDRKSDCETGDKWFFPPWAAQLIIDDNVAAVVDKKLGNVYNIEEAKRVALVAVWCIQDDEAMRPTMSMVV

SEQ ID NO: 155 - protein, 269 aa, Solanum lycopersicum
SEKLGHGGFGTVFLGELSDSSLVAVKRLERAGGGEKEFRAEVCTIGNIQHVNLVRLRGFCTENSHRLLVYEYMSKGPLSAYLRRDSQNLSWDVRFRIAVGTARGITYLHEECRNCIIHCDIKPENILLDEDFSAKVSDFGLAKLLGRDFSRVLATMRGTWGYVAPEWISGLAITTKADVYSYGMTLLELIGGRRNVESPPSAKGEEGGTEEKWFFPPWAARQIVEGNIAAVMDERLHGTYNLTEAERVGLIAIWCIQDDESTRPSMGMV

SEQ ID NO: 156 - protein, 263 aa, Solanum lycopersicum
TKLGQGGFGCVYKAMLVGQEVAVKRLSKNSGQGVEEFKNELRLIARLQHRNLVRLLGCCVDMEEKMLIYEYLENKSLDSILFNKQKSSLLDWQKRFNIICGIARGLLYLHQDSRFRIIHRDLKASNILLDKDLTPKISDFGMARIFGGDETEGNTKRVVGTYGYMSPEYAMDGLFSVKSDVFSFGVLVLEIVTGKKNRGFYYQNNQLNLLGHAWRLWKEGSGSELLDPSFGESFSPSEVMRCIQVGLLCVQEQAEDRPNMATV

SEQ ID NO: 157 - protein, 131 aa, Solanum lycopersicum
GMLPDNRLVAVKDFNASIDERRFRAAVLKIGSIYHKNLLRLDGYCCQSGRRLLVYELAKYGSVDKCLEEPRMCKRLTWRKRMDICLSVARAISYLHTGCREFISHGNLKCENVVLDDELEAKVSEFGLRTI

SEQ ID NO: 158 - protein, 290 aa, Arabidopsis thaliana
LASLEIIGRGGCGEVFKAELPGSNGKIIAVKKVIQPPKDADELTDEDSKFLNKKMRQIRSEINTVGHIRHRNLLPLLAHVSRPECHYLVYEYMEKGSLQDILTDVQAGNQELMWPARHKIALGIAAGLEYLHMDHNPRIIHRDLKPANVLLDDDMEARISDFGLAKAMPDAVTHITTSHVAGTVGYIAPEFYQTHKFTDKCDIYSFGVILGILVIGKLPSDEFFQHTDEMSLIKWMRNIITSENPSLAIDPKLMDQGFDEQMLLVLKIACYCTLDDPKQRPNSKDVRTML

SEQ ID NO: 159 - protein, 265 aa, Oryza sativa
DSALIGQGGYGKVYRGILSDGTIVAIKRAQQGSLQGSKEFFTEIELLSRLHHRNLVSLLGYCDEEDEQMLVYEFMPNGTLRDHLSARSKEPLNFPTRLRIALGSSRGILYLHTEADPPIFHRDIKASNILLDSKFVAKVADFGLSRLAPEPESEGIAPGHVSTVIKGTPGYLDPEYFLTHKLTDKSDVYSLGVVFLELLTGMQPISHGRNIVREVVAANQSGMILSVVDSRMGSYPAECVEKFAALALRCCRDETDARPSIVEVM

SEQ ID NO: 160 - protein, 265 aa, Oryza sativa
NHEIGSGGYGKVYRGILGDGTRVAIKRADRNSMQGAVEFKNEIELLSRVHHRNLVSLIGFCYEQGEQMLVYEYISNGTLRENLTGSGMYLDWKKRLRIALGSARGLAYLHELADPPIIHRDIKSTNILLDNNLKAKVADFGLSKLVADTEKGHVSTQVKGTLGYLDPEYYMTQQLSEKSDVYSFGVVMLELVSGRQPIEKGRYVVREVRLAIDPADHDHHYGLRGIVDPAIRDAARTPVFRRFVQLAMRCVDESAAARPAMGAVV

SEQ ID NO: 161 - protein, 215 aa, Oryza sativa
NDIGTGGYGKVYRGTLPTGQLVAVKRSQQGSLQGNLEFRTEIELLSRVHHKNVVSLVGFCFDQGEQMLVYEYVPNGTLKESLTGKSGVRLDWKRRLRVVLGAAKGIAYLHELADPPIIHRDIKSSNVLLDERLNAKVSDFGLSKLLGEDGRGQITTQVKGTMGYLDPEYYMTQQLTDRSDVYSFGVLLLEVITARKPLERGRYVVREVKEAVDRR

SEQ ID NO: 162 - protein, 265 aa, Medicago truncatula
SSAQVGQGGYGKVYKGVISGGTAVAIKRAQEGSLQGEKEFLTEISLLSRLHHRNLVSLIGYCDEEGEQMLVYEYMPNGTLRDHLSVSAKEPLTFIMRLKIALGSAKGLMYLHNEADPPIFHRDVKASNILLDSKLSAKVADFGLSRLAPVPDMEGIVPGHVSTVVKGTPGYLDPEYFLTHKLTDKSDVYSLGVVFLEILTGMHPISHGKNIVREVNLSYQSGVIFSIIDERMGSYPSEHVEKFLTLALKCVNDEPDNRPTMAEVV

SEQ ID NO: 163 - protein, 266 aa, Medicago truncatula
NELGFGGYGKVYKGVFPDGKIVAIKRAQQGSMQGGLEFKNEIELLSRVHHKNLVGLVGFCFEQGEQMLVYEFISNGTLREGLSGKSGYQLDWKRRLRIALGSARGLAYLHELANPPIIHRDVKSTNILLDESLTAKVADFGLSKLVSDSEKGHVSTQVKGTMGYLDPEYYMTQQLTEKSDVYSFGVVMLELITSKQPIEKGKYVVREVRTLMNDNDEEYYGLRELMDPVVRNTANLIGFGRFLELAMQCVEELASDRPTMSEVVKA

SEQ ID NO: 164 - protein, 267 aa, Arabidopsis thaliana
NKIGEGGFGPVHKGIMTDGTVIAVKQLSAKSKQGNREFLNEIAMISALQHPHLVKLYGCCVEGDQLLLVYEYLENNSLARALFGPQETQIPLNWPMRQKICVGIARGLAYLHEESRLKIVHRDIKATNVLLDKELNPKISDFGLAKLDEEENTHISTRVAGTYGYMAPEYAMRGHLTDKADVYSFGVVALEIVHGKSNTSSRSKADTFYLLDWVHVLREQNTLLEVVDPRLGTDYNKQEALMMIQIGMLCTSPAPGDRPSMSTVVSM

SEQ ID NO: 165 - protein, 209 aa, Oryza sativa
ANKIGEGGFGSVYKGLLSDGTIIAVKQLSSRSKQGNREFVNEIGMISALQHPNLVKLYGCCTEGNQLLLVYEYMENNCLARALFGTVEQYRLSLDWPTRRKICLGIARGLAYLHEESAIRIVHRDIKASNILLDKDLSAKISDFGLAKLNDDDHTHISTRIAGTIGYMAPEYAMRGYLTDKADVYSFGVVALEIVSGKSNTSYRPKEDF

SEQ ID NO: 166 - protein, 268 aa, Oryza sativa
GHKLGQGSFGCVYLGKLRNGQKVAIKVLSSESRQGTREFLNELSVISNINHHNLVKLHGCCVDGDQKMLVYNYLENNSLAQSLFGNSHSSIQLDWKTRVKICIGVASGLKYLHEEVRPVIVHRDIKASNILLDKDLSPKISDFGLAKLFPGNMTHISTRVAGTLGYLAPEYAIRGQLTKKADVYSFGVLLLEIVSGRCHTDPRLPLQDQFLLERAWALYESGDLKSLVDGTLKGVFDTEEAQRLLKIGLLCTQDTPKIRPSMSTIVKM

SEQ ID NO: 167 - protein, 207 aa, Medicago truncatula
ISNKIGEGGFGPVYKGCLPNGTLIAVKQLSSKSKQGNREFLNEIGMISALQHPYLVKLYGCCVEGDQLLLIYEYMENNSLSRALFGPEEYQIKLDWPIRQKICVGIARGLAYLHEESRLKVVHRDIKATNVLLDTSLDPKISDFGLAKLDEEDKTHISTRIAGTYGYMAPEYAMRGYLTDKADVYSFGIVALEIVSGRSNTMYRSKE

SEQ ID NO: 168 - protein, 266 aa, Solanum lycopersicum
NKIGEGGFGPVYKGVLADGAIIAVKQLSSKSKQGNREFVNEIGMISALQHPNLVKLYGCCIEGNQLLVIYEYMENNCLARALFGRDDQRLNIDWATRKRICSGIAKGLAYLHEESRLKIVHRDIKCTNVLLDKDLNAKISDFGLAKLDEEENTHISTRIAGTVGYMAPEYAMRGYLTDKADVYSFGVVLLEIVSGKSNTNYRPKEEFVYLLDWAYVLQEQGNLLELVDPRLGTNYSKKEAMRMINVSLLCTNPSPTLRPSMSSVVS

SEQ ID NO: 169 - protein, 264 aa, Arabidopsis thaliana
SRVLGVGGFGKVYRGEIDGGTTKVAIKRGNPMSEQGVHEFQTEIEMLSKLRHRHLVSLIGYCEENCEMILVYDYMAHGTMREHLYKTQNPSLPWKQRLEICIGAARGLHYLHTGAKHTIIHRDVKTTNILLDEKWVAKVSDFGLSKTGPTLDHTHVSTVVKGSFGYLDPEYFRRQQLTEKSDVYSFGVVLFEALCARPALNPTLAKEQVSLAEWAPYCYKKGMLDQIVDPYLKGKITPECFKKFAETAMKCVLDQGIERPSMGD

SEQ ID NO: 170 - protein, 262 aa, Oryza sativa
LGVGGFGKVYRGEIDGGATKVAIKRGNPLSEQGVHEFQTEIEMLSKLRHRHLVSLIGYCEEKNEMILVYDYMAHGTLREHLYKTQNAPLSWRQRLDICIGAARGLHYLHTGAKHTIIHRDVKTTNILLDEKWVAKVSDFGLSKTGPTMDHTHVSTVVKGSFGYLDPEYFRRQQLTDKSDVYSFGVVLFEVLCARPALNPTLAKEEVSLAEWALHCQKKGILDQIVDPHLKGKIAPQCFKKFAETAEKCVSDQGIDRPSMGDV

SEQ ID NO: 171 - protein, 263 aa, Medicago truncatula
ILGVGGFGKVYKGEIDGGSTKVAIKRGNPLSEQGVHEFQTEIEMLSKLRHRHLVSLIGYCEENTEMILVYDHMAYGTLREHLYKTQKPPLPWKQRLEICIGAARGLHYLHTGAKYTIIHRDVKTTNILLDEKWVAKVSDFGLSKTGPTLDNTHVSTVVKGSFGYLDPEYFRRQQLTDKSDVYSFGVVLFEVLCARPALNPTLAKEQVSLAEWAAHCYKKGILDQITDPYLKGKIAPECFKKFAETAMKCVNDQGIERPSMGDV

SEQ ID NO: 172 - protein, 265 aa, Arabidopsis thaliana
FKESEIIGTGGFGIVYRGNLSSSGPIAVKKITSNSLQGVREFMAEIESLGRLGHKNLVNLQGWCKHKNELLLIYDYIPNGSLDSLLYQTPRRNGIVLPWDVRFEIIKGIASGLLYLHEEWEQIVVHRDVKPSNVLIDEDMNAKLGDFGLARLYERGTLTQTTKIVGTLGYMAPELTRNGKGSTASDVFAFGVLLLEIVCGNKPTNAENFFLADWVMEFHTNGGILCVVDQNLGSSFNGREAKLALVVGLLCCHQKPKFRPSMRMV

SEQ ID NO: 173 - protein, 209 aa, Arabidopsis thaliana
FKEKQLLGKGGFGQVYKGTLPGSDAEIAVKRTSHDSRQGMSEFLAEISTIGRLRHPNLVRLLGYCRHKENLYLVYDYMPNGSLDKYLNRSENQERLTWEQRFRIIKDVATALLHLHQEWVQVIIHRDIKPANVLIDNEMNARLGDFGLAKLYDQGFDPETSKVAGTFGYIAPEFLRTGRATTSTDVYAFGLVMLEVVCGRRIIERRAAE

SEQ ID NO: 174 - protein, 267 aa, Oryza sativa
SDKHILGAGGFGRVYKGILPKSKLEVAVKRVSHESRQGMKEFVAEVASIGRIRHRNLVQLLGYCRRKGELLLVYDYMSNGSLDRYLHYEGNKPVLDWVQKFQIIKDVASGLLYLHEKWDKVVIHRDIKASNVLLDKEMNARLGDFGLARLYDHGTDAHTTHMVGTMGYLAPELIHTGKASTLTDVFAFGTFLLEVICGQRPIKEDAHGNQILLVDWVLEHWHNESLLDTVDPRLQGDYNVEEACLVLKLGLLCSHPSTNARPCMQQV

SEQ ID NO: 175 - protein, 214 aa, Medicago truncatula
FKEKELLGTGGFGRVYKGVMPISKLEVAVKRVSHESRQGMKEFVAEIVSIGRLRHRNLVPLLGYCRRKGELLLVYDYMQNGSLDKYLHTKQQRFTLNWSQRFRIIKGVASGLFYLHEEWEQVVIHRDIKASNVLLDGEMNGRLGDFGLSRLYDHGTDPQTTHVVGTLGYLAPEHTRTGKATTSSDVYSFGAFLLEVVCGKRPIEQVRECESESI

SEQ ID NO: 176 - protein, 203 aa, Solanum lycopersicum
RDKELLGFGGFGRVYKGTLPKTNIVVAVKRIHHEAKQGLQEFVSEIATIGRLRHRNLVQLLGWCRRRGDLLLVYDFMSNGSLDKYIYDEPRVTLTWDQRFKVIKGVASGLLYLHEEWEQTVIHRDIKAGNVLLDSDMNGRLGDFGLAKLYEHGENPSTTRVVGTLGYLAPELTKTGKPTTSSDVFAFGALLLEVVCGRRPIEA

SEQ ID NO: 177 - protein, 262 aa, Solanum lycopersicum
VIGVGGFGKVYKGVIDGDTKVAIKRSNPSSQQGVNEFQTEIELLSMLRHRHLVSLIGFCEENNEMVLVYDHMAYGTLREHLYKGNKTVLSWKQRLEICIGAARGLHYLHTGSKYTIIHRDVKSTNILLNDKWVAKVSDFGLSKTGPNMNQGHVSTVVKGSFGYLDPEYFRRQQLTEKSDVYSFGVVLFEVLCARPALNPTRSKEQVSLADWALACQRKGNLEDIIDPHLKGKINPECLKKFAETAEKCLADNGVDRPSMGDV

SEQ ID NO: 178 - protein, 269 aa, Arabidopsis thaliana
VDNLLGEGTFGRVYRAEFDDGKVLAVKKIDSSALPHGMTDDFIEMVSKIANLDHPNVTKLVGYCAEHGQHLVVYEFHKNGSLHDFLHLSEEESKALVWNSRVKIALGTARALEYLHEVCSPSIVDKNIKSANILLDSELNPHLSDSGLASFLPTANELLNQTDEGYSAPEVSMSGQYSLKSDIYSFGVVMLELLTGRKPFDSTRSRSEQSLVRWATPQLHDIDALAKMVDPALKGLYPVKSLSRFADVIALCVQPEPEFRPPMSEVVQA

SEQ ID NO: 179 - protein, 269 aa, Oryza sativa
MDNLVGEGTFGRVYRAQFTGGKVLAVKKLDSTVMPFHSSDDFAELVSDISKLHHPNLNELVGYCMEHGQHLLVYDFHRNGSLHDLLHLSDEYSKPLSWNSRVKIALGSARALEYLHEICSPSIIHKNFKSSNLLLDSEFNPHLSDAGLASFISDAEFQAAQQSAGCTAPEVDMTGQYTLKSDVYSFGVVMLELLTGRRPFDSTRPRSEQSLVRWATPQLHDIDALDRMVDPALKGLYPAKSLSRFADVLALCVQPEPEFRPPMSEVVQA

SEQ ID NO: 180 - protein, 269 aa, Medicago truncatula
SVDHLVGEGSFGRVYHAQFDDGKVLAVKKIDSSVLPNDFSEDFIEIVSNISCLHHPNVTELVGYCSEHGQHLLVYEFHKNGSLHDYLHVSDEYSKPLIWNSRVKIALGTARALEYLHEVCSPSVVHKNIKSANILLDAELNPHLSDCGLASYIPNAEQILNHNVGSGYDAPEVALSGQYTFKSDIYSFGVVMLELLSGRRPFDSSRARQEQSLVRWATPQLHDIDALAKMVDPTLKGLYPVKSLSRFADVIALCVQPEPEFRPQMSEVV

SEQ ID NO: 181 - protein, 268 aa, Solanum lycopersicum
VDNLIGEGSFGRVYRAQFDDGKVLAVKKINSSALQNPEDFLDIVSEISRLNHPNVTELVGYCSEHGQHLLVYEFHKNGSLHDFLHLSDEESKPLTWNSRVKIALGTARALEYLHEVCSPSLVHKNIKSANIVLDAELNPHLSDCGLASLIADADQALNHNTGSGYGAPEVAMSGLCTIKSDVYSFGVVMLELLTGRKPFDSARTRSEQDLVRWATPQLHDIDALAKMVDPALEGLYPVKSLSRFADVIALCVQPEPEFRPPMSEVVEA

SEQ ID NO: 182 - protein, 266 aa, Arabidopsis thaliana
HVLGKGGFGTVYKGKLADSGRDVAVKILKVSEGNGEEFINEVASMSRTSHVNIVSLLGFCYEKNKRAIIYEFMPNGSLDKYISANMSTKMEWERLYDVAVGISRGLEYLHNRCVTRIVHFDIKPQNILMDENLCPKISDFGLAKLCKNKESIISMLHMRGTFGYIAPEMFSKNFGAVSHKSDVYSYGMVVLEMIGAKNIEKVEYSGSNNGSMYFPEWVYKDFEKGEITRIFGDSITDEEEKIAKKLVLVALWCIQMNPSDRPPMIK

SEQ ID NO: 183 - protein, 263 aa, Arabidopsis thaliana
EVLGKGTFGTAYKAVLDAVTVVAVKRLKDVMMADKEFKEKIELVGAMDHENLVPLRAYYFSRDEKLLVYDFMPMGSLSALLHGNRGAGRSPLNWDVRSRIAIGAARGLDYLHSQGTSTSHGNIKSSNILLTKSHDAKVSDFGLAQLVGSSATNPNRATGYRAPEVTDPKRVSQKGDVYSFGVVLLELITGKAPSNSVMNEEGVDLPRWVKSVARDEWRREVFDSELLSLATDEEEMMAEMVQLGLECTSQHPDQRPEMSEVVR

SEQ ID NO: 184 - protein, 259 aa, Oryza sativa
EVLGKGAFGTTYKAVLESGATVAVKRLKDVTLTEPEFRDRIADIGELQHEFIVPLRAYYYSKDEKLLVYDFMPMGSLSAVLHGNRGSGRTPLNWETRSSIALAAARGVEYIHSTSSSASHGNIKSSNVLLNKSYQARLSDNGLSALVGPSSAPSRASGYRAPEVTDPRRVSQKADVYSFGVLLLELLTGKAPSQAALNDEGVDLPRWVQSVVRSEWTAEVFDMELLRYQNVEEQMVQLLQLAIDCVAQVPDARPSMPHV

SEQ ID NO: 185 - protein, 261 aa, Medicago truncatula
AEVLGKGTFGTAYKAVLESGPVVAVKRLKDVTITEKEFREKIEAVGAIDHQSLVPLRAYYFSRDEKLLVYDYMSMGSLSALLHGNKGAGRTPLNWEMRSGIALGAAKGIEYLHSQGPNVSHGNIKSSNILLTKSYDARVSDFGLAQLVGPSSTPNRVAGYRAPEVTDARKVSQKADVYSFGVLLLELLTGKAPTHALLNEEGVDLPRWVQSVVREEWTSEVFDLELLRYQNVEEEMVQLLQLAVDCAAQYPDKRPSMSEVV

SEQ ID NO: 186 - protein, 259 aa, Solanum lycopersicum
EVLGKGTFGTAYKAVLEMGTVVAVKRLKDVTISDMEFREKIDQVGQMNHENLVPLRAYYYSREEKLLVYDYMPMGSLSALLHGNKGASKTPLDWKVRSGIALGTARGIEYLHSQGSTVHGNIKSSNVLLTKSYDARVSDFGLAQLVGPPTSPTRVAGYRAPEVTDPRRVTQKADVYSFGVLLLELLTGKAPTHALLNEEGVDLPRWVQSIVQDQWTSQVFDIELLRYQSVEEEMVQLLQLAIDCSTQYPDNRPSMSDVV

SEQ ID NO: 187 - protein, 319 aa, Oryza sativa
LASLAVIGRGGCGEVYKAQLPPEREGDAPRFIAIKKIKKRSGDGSGGQNNNLSDEESRQLDKWTRQIQSEIRTVGHIRHRNLLPLAAHVPRPDCHYLVYEFMKNGSLHNALKATTTDTTTNDYNDNNSGEHPPPSPALPWPARLRIAVGIAAGLEYLHVSQRPQIIHRDLKPANILLDDDMEARIADFGLAKAMPDAHTHMTTSNVAGTLGYIAPEYHQTLKFTAKCDVYSFGVILAVLGTGKEPTDKFFAQQVVDDVGIVRWLRRVMQEGDPAAQAGVIDAAIAGAGHDEQILLVLRIAVFCTADDPKDRPTAKDVRC

SEQ ID NO: 188 - protein, 293 aa, Arabidopsis thaliana
FSSSNIVGSGSFGTVFKALLQTENKIVAVKVLNMQRRGAMKSFMAECESLKDIRHRNLVKLLTACASIDFQGNEFRALIYEFMPNGSLDKWLHPEEVEEIHRPSRTLTLLERLNIAIDVASVLDYLHVHCHEPIAHCDLKPSNILLDDDLTAHVSDFGLARLLLKFDQESFFNQLSSAGVRGTIGYAAPEYGMGGQPSIHGDVYSFGVLVLEMFTGKRPTNELFGGNFTLNSYTKAALPERVLDIADKSILHSGLRVGFPVLECLKGILDVGLRCCEESPLNRLATSEAAKEL

SEQ ID NO: 189 - protein, 220 aa, Arabidopsis thaliana
STNLIGSGNFGNVFKGLLGPENKLVAVKVLNLLKHGATKSFMAECETFKGIRHRNLVKLITVCSSLDSEGNDFRALVYEFMPKGSLDMWLQLEDLERVNDHSRSLTPAEKLNIAIDVASALEYLHVHCHDPVAHCDIKPSNILLDDDLTAHVSDFGLAQLLYKYDRESFLNQFSSAGVRGTIGYAAPEYGMGGQPSIQGDVYSFGILLLEMFSGKKPTDE

SEQ ID NO: 190 - protein, 218 aa, Oryza sativa
ANLIGVGSFGSVYKGVVGSEEEEVAIKVLNLLQHGAERSFLAECEALRSVRHRNLVKIITACSTVDHYGNDFKALVYEFMPNRDLDKWLHPTIDDDDESFSRVLTMSERLRIALDVAEALDYLHRHGQVPIVHCDLKPSNVLLDNDMVAHVGDFGLSRFVLGTNNNSIQYSSISAGIKGTVGYIPPEYGMGGEISVEGDVYSYGILLLEMFTAKRPTD

SEQ ID NO: 191 - protein, 299 aa, Medicago truncatula
FSARNLVGSGSFGSVYKGNLESEDKVVAVKVMNLQKKGAHKSFIAECNALKNIRHRNLVKILTCCSSTDYKGQEFKALVFEYMNNGSLEQWLHPRSVNVENQRTLDLDQRLNIAVDIAFVLHYLHLECEQSIIHCDLKPSNVLLDDDMVAHVSDFGIARLVSVIDDTSHRETSTIGIKGTIGYAPPEYGMGSEVSTYGDMYSFGMLLLEILTGRRPVDEMFDNGQNLRIFVEISLPNNLIHILDPNLVPRNIEATIEDGNSGNFTPNVEKCVVSLFRIGLACSVESPKERMNIVDVIRD

SEQ ID NO: 192 - protein, 220 aa, Medicago truncatula
DRNLIGSGGFGSVYKGNLMSEDKVIAVKVLNLEKKGAHKSFITECNALKNIRHRNLVKILTCCSSIDNKGLEFKALVFEYMRNGSLEQWLHPGTMNADHPRTLKFEQRLNILVDVSSALHYLHHECEQLVLHCDLKPSNVLIDDDIVAHVSDFGIARLVSSADNNSCQETSTIGIKGTIGYAPPEYGMSSEVSTHGDMYSFGMLILEMLTGRRPTDDMFT

SEQ ID NO: 193 - protein, 301 aa, Solanum lycopersicum
FSSENLIGSGSFGTVYKGTFPSDGTVVAVKVLKLQHEGASKSFLAECQALRNIRHRNLVKVISVCSSSDFNGNDFKALVFQFMPKGNLDEWLHPENEMHEKSSLTILQRMNIIIDVASALHYLHHECQTPMIHCDIKPQNILLDEDLTAHLGDFGLVRLVPEFSNESVLHQFSSLGVLGTIGYAAPEYGMGSKVSIVGDMYSFGILILEIFTGRRPTDTLFQASSTLHHFVETALPEKVTEILDKTAFQDEMSKATCLEEYWGNIKKEQMECLVGILEIGVACSAESPRDRLTMTQVYSKL

SEQ ID NO: 194 - protein, 238 aa, Solanum lycopersicum
SNNLIGSGSFGSVYRGNLSPEGTIIAVKVLKLEKKGASKSFLAECEALRNIRHRNLVKISTVCSSVDFDGNDFKALIYPFMENGSLEEWLHPKEGQMLQKRLSILHRLNITIDVASALHYLHSQCHTSIVHCDLKPSNILLDNDLTALVSDFGLAKFLSDAGQNADVNQFSSSGIKGTVGYAAPEYGMGGQVSSQGDVYSFGILLLEIFTGRRPTSELFEDNETLHSFVKQALPRQVM

SEQ ID NO: 195 - protein, 273 aa, Arabidopsis thaliana
IKRGHSGNLFRGFLENGIPVVIKKIDVREGKSEGYISELELFSKAGHQRLVPFLGHCLENESQKFLVYKFMRHGDLASSLFRKSENEGDGLKSLDWITRLKIALGAAEGLSYLHHECSPPLVHRDVQASSILLDDKFEVRLGSLSEAYAQGDAYQSRISRLLRLPQSSEPSSSGVTNAICSYDVYCFGKVLLELVTGKLGISSPDNALAKEYMEEALPYISTNEKELVTKILDPSLMVDEDLLEEVWAMAIIAKSCLNPKPTRRPLMRHIVNA

SEQ ID NO: 196 - protein, 274 aa, Oryza sativa
LIKHGHSGDLYLGALHDGTSVVVKRITSSMAKKDAYMAELDLFAKGLHERLVPIMGHCLDKEEEKFLVYIFVRNGDLSSALHRKSGEEEEGLQSLDWIKRLKIATGVAEALCYLHHECNPPMVHRDVQASSILLDDKFDVRLGSLSEVCPQEGEGHQNVITKLLRFSSTADQGSSGSPSASCSYDVYCFGKVLLELVTGRLGISASNDAATNEWLDHTLRYINIYEKELMSKIIDPSLIIDEDHLEEVWAMAIVAKSCLNPRSSKRPPMKYILK

SEQ ID NO: 197 - protein, 273 aa, Medicago truncatula
IKHGHTGDLFNGVLENGIPVVIKRIDMRSTKKDAFLSELDFFNKVSHQRFVPLLGHCLENENEKFLVYKLMPKGDLSNCLFFKNTTAEDGTLQSLDWITRLKIATGAAEAVSYLHHECIPPIVHRDIQASSILLDDRYEVRLGSLSEASGQEGDIHQSKITRFLRLPQSSEQGASGSSTSVCAYDVYCFGKVLLELVTGKLGISASSEGVLREWLDQILPCINMYDKELVTKIVDPSLVVDEDFLEEVWAIAIVARSCLNPKPSRRPPMRYVL

SEQ ID NO: 198 - protein, 271 aa, Solanum lycopersicum
KHGHSGDLFRGTLEGGTLIVVKRIDVQSARNEAYLSELDFFSKVSHSRLVPFMGHCLENENEKFVVYKYMPNGDLSSSLFRKNNSDDDSLQSLDWITRLKIAIGAAEGLSYLHHECNPPLVHRDVQASSILLDDKFEVRLGSLNEACAQEGESHQNRISRLLRFPQTSEQGASGSPSATCAYDVYCFGKVLLELVTGKLGISASNDASMKEWLDGTLKYISIYDKELVTNIVDPSLIIDEDLLEEVWAMAIVARSCLNPKPSRRPLMRYIL

SEQ ID NO: 199 - protein, 265 aa, Arabidopsis thaliana
FQRALGEGGFGVVYHGYLNGSEQVAVKLLSQSSVQGYKEFKAEVELLLRVHHINLVSLVGYCDDRNHLALVYEYMSNGDLKHHLSGRNNGFVLSWSTRLQIAVDAALGLEYLHIGCRPSMVHRDVKSTNILLGEQFTAKMADFGLSRSFQIGDENHISTVVAGTPGYLDPEYYRTSRLAEKSDIYSFGIVLLEMITSQHAIDRTRVKHHITDWVVSLISRGDITRIIDPNLQGNYNSRSVWRALELAMSCANPTSEKRPNMSQVV

SEQ ID NO: 200 - protein, 269 aa, Oryza sativa
FQRVLGEGGFGKVYDGFLEDGTQVAVKLRSESSNQGDKEFLAEAQILTRIHHKSLVSMIGYCKDGKYMALVYEYMSEGTLREHISGKRNNGRYLTWRERLRIALESAQGLEYLHKWCNPPLIHRDVKATNILLNAKLEAKIADFGLSKTFNLENGTHVSTNTLVGTPGYVDPEYQATMQPTTKSDVYSFGVVLLELVTGKPAVLRDPEPISIIHWAQQRLAQGNIEGVVDARMHGDHDVNGVWKATDIALKCTTQVSAQRPTMTDVVAQ

SEQ ID NO: 201 - protein, 265 aa, Medicago truncatula
FNRVLGKGGFGTVYHGLIDDTEVAVKMLSKSSVHGFEQFLAEVKLLMRVHHKNLTSLIGYCNEGKDIGLIYEYMANGNLDELLSGKNSKGKFLTWADRLGIAVDAAQGLEYLHNGCKPPIIHRDVKSTNILLNESFQAKLADFGLSKNFPSDGGTHLSTVVAGTPGYLDYEYMTSNRLTEKSDVYSFGVVLLEIITSQPAITKSPDKTHISQWVRSMFYNGDIKNIVDSRLQQDFDTNSAWKAVDIGMACVSTNSSDRPNMSEVM

SEQ ID NO: 202 - protein, 262 aa, Solanum lycopersicum
FQRVLGKGGFGTVYLGYVDNRDVAVKMLSPSSVQGFKEFQAEASLLMSIHHKNLISIVGYCVEGNHIGIIYEYMANRSLDMQLSDRNPNALTWEERLHIALDAAQGLEYLHHGCQPSIIHRDIKSSNILLDDKFQAKLADFGLSRTLPTGEGSHVTTIIAGSPGYLDPDYYRTNKLTEKSDVYSFGVVLLEIITGRHLLGKHDKIYVITWVNGMINDNGDVSKVIDPRLGGQVDLNSAKRIVALAMACVSLEPTNRPAISLV

SEQ ID NO: 203 - protein, 271 aa, Arabidopsis thaliana
SNKNILGRGGFGKVYKGRLADGTLVAVKRLKEERTQGGELQFQTEVEMISMAVHRNLLRLRGFCMTPTERLLVYPYMANGSVASCLRERPESQPPLDWPKRQRIALGSARGLAYLHDHCDPKIIHRDVKAANILLDEEFEAVVGDFGLAKLMDYKDTHVTTAVRGTIGHIAPEYLSTGKSSEKTDVFGYGVMLLELITGQRAFDLARLANDDDVMLLDWVKGLLKEKKLEALVDVDLQGNYKDEEVEQLIQVALLCTQSSPMERPKMSEVV

SEQ ID NO: 204 - protein, 270 aa, Oryza sativa
SNKNILGRGGFGKVYKGRLADGSLVAVKRLKEERTPGGELQFQTEVEMISMAVHRNLLRLRGFCMTPTERLLVYPYMANGSVASRLRERPPSEPPLDWRTRRRIALGSARGLSYLHDHCDPKIIHRDVKAANILLDEDFEAVVGDFGLAKLMDYKDTHVTTAVRGTIGHIAPEYLSTGKSSEKTDVFGYGIMLLELITGQRAFDLARLANDDDVMLLDWVKGLLKEKRLEMLVDPDLQSNYIDVEVESLIQVALLCTQGSPTERPKMAEV

SEQ ID NO: 205 - protein, 271 aa, Medicago truncatula
SNKNILGRGGFGKVYKGRLADSTLVAVKRLKEERTQGGELQFQTEVEMISMAVHRNLLRLRGFCMTSTERLLVYPYMANGSVASCLRERNEVDPPLEWPMRKNIALGSARGLAYLHDHCDPKIIHRDVKAANILLDEEFEAVVGDFGLAKLMDYKDTHVTTAVRGTIGHIAPEYLSTGKSSEKTDVFGYGVMLLELITGQRAFDLARLANDDDVMLLDWVKGLLKDKKLETLVDAELKGNYEDDEVEQLIQVALLCTQGSPMERPKMSEVV

SEQ ID NO: 206 - protein, 270 aa, Solanum lycopersicum
SSKNILGSGGFGVVYKGRLNNGTVVAVKRLKDYNAVGGEIQFQTEVELISLAVHRNLLRLWGFCSTESERLLVYPYMPNGSVAARLKDHIHGRPVLDWSRRKGIAVGTARGLVYLHEQCDPKIIHRDVKAANILLDEEFEAVVGDFGLAKLLDHRDSHVTTAVRGTVGHIAPEYLSTGQSSEKTDVFGFGILLLELITGQKAVEFGRGANQKGVMLDWVKKLHVEKKLNLMVDKDLKNNFDGIELEEMVQVALLCTHFIPTYRPKMSEVL

SEQ ID NO: 207 - protein, 270 aa, Solanum lycopersicum
NRNILGRGGFGKVYKGRLADGSLVAVKRLKEERTQGGELQFQTEVEMISMAVHRNLLRLRGFCMTPTERVLVYPYMENGSVASRLRERPESEPPLDWPKRKRIALGSARGLAYLHDHCDPKIIHRDVKAANILLDEEFEAVVGDFGLAKLMDYKDTHVTTAVRGTIGHIAPEYLSTGKSSEKTDVFGYGVMLLELITGQRAFDLARLANDDDVMLLDWVKGLLKDKKYETLVDADLQGNYNEEEVEQLIQVALLCTQSTPTERPKMSEVV

SEQ ID NO: 208 - protein, 263 aa, Arabidopsis thaliana
NLLGKSNVSSVYKGILRDGSVAAIKCIAKSSCKSDESEFLKGLKMLTLLKHENLARLRGFCCSKGRGECFLIYEFVPNGNLLQYLDVKDETGEVLEWATRVSIINGIARGIVYLHGENGNKPAIVHQNLSAEKILIDHWYNPSLADSGLHKLFTDDIVFSKLKASAAMGYLAPEYITTGRFTDKSDVYAFGMILLQILSGKSKISHLMILQAVESGRLNEDFMDPNLRKNFPEVEAAQLARLGLLCTHESSNQRPSMEDVIQE

SEQ ID NO: 209 - protein, 261 aa, Oryza sativa
NLLGKSGFAATYKGILRDGSVVAVKSLNKTSCKQEESDFLRGLKMLTVLRHENLVGLRGFCCSRGRGECFLVYDYMVNGCLSQYLDVKEGSGANVLDWPTRVSIIRGIAKGVEYMHSKKANKPSVVHQNISAEKILLDHHLTPRLSVPGLHKLLADDVVFSTLKASAAMGYLAPEYATTGRFTEKSDVFAFGIVVLQVITGRRAVSQLKVSTVANDLDSLIDENLNGVFSRTEAAKLAAIAALCTSETASQRPTMEAVVQQ

SEQ ID NO: 210 - protein, 256 aa, Medicago truncatula
SNVIGTSPIGNIYKGTLSSGVEIAVASVTVTSLKDWSKTSEVQFRKKIDTLSKMNHKNFVNLLGFCEEDEPFTRMVVFEYAPNGTLFEHLHVKEAEHLDWATRLRVAIGTAYCLQHMHQLDPPFAHSDLNTSSVQLTDDYAAKISDLSFLNEIASADIKAAAKKHTDATLASNIYSFGIILLEIVTGRVPYSMGKDDSLEEWASRYLQGDQPLKEIVDPTLASFQEEQLVQIGALIKSCVNADQEQRPTMKQICER

SEQ ID NO: 211 - protein, 261 aa, Medicago truncatula
NLLGKSNFSATYKGVLRDGSIVAIKSISKTSCKSDEGEFLKGLNILTSLRNDNLVRLRGFCCSRGRGECFLVYDFVSNGNLSQYLDVKEGDGEVLEWSTRVSIVKGIAKGISYLHAYKANKPALVHQNISAEKVLIDQRQNPVLSDSGLYKLLTNDIVFSSLKGSAAKGYLAPEYTTTGRFTDKSDVYAFGILLFQILTGKHKITSSLRLAAESFKFQEFIDQNLHGRFFEYEAAKLARMAILCSHDSPFERPTMEAIVQE

SEQ ID NO: 212 - protein, 261 aa, Solanum lycopersicum
NLLGKSNFTAVYKGTLRDGSVVAIKCISKTSCKSDETEFLKGLKLLTSLNHENLLRLRGFCCSKGRGECFLIYDFVPNGNLLQYLDVKDGKGKVLDWSTRLRIIKGIARGIHYLHGNKGGKPALVHRNISAEKVLVDQHYNPLLSDSGLHKLLADDIVFSTLKESAAMGYLAPEYTTTGRFTEKSDLYAFGMIIFQVLSGRCKITPSNHQGAELCRFEDFIDPNLWGNFVEAEAVQMAKVALLCTHESPNQRPDIEIVMQE

SEQ ID NO: 213 - protein, 273 aa, Arabidopsis thaliana
SDNILGSGGFGVVYKGELHDGTKIAVKRMENGVIAGKGFAEFKSEIAVLTKVRHRHLVTLLGYCLDGNEKLLVYEYMPQGTLSRHLFEWSEEGLKPLLWKQRLTLALDVARGVEYLHGLAHQSFIHRDLKPSNILLGDDMRAKVADFGLVRLAPEGKGSIETRIAGTFGYLAPEYAVTGRVTTKVDVYSFGVILMELITGRKSLDESQPEESIHLVSWFKRMYINKEASFKKAIDTTIDLDEETLASVHTVAELAGHCCAREPYQRPDMGHAV

SEQ ID NO: 214 - protein, 271 aa, Oryza sativa
ENVLGRGGFGTVYKGELHDGTKIAVKRMEAGVMGNKGLNEFKSEIAVLTKVRHRNLVSLLGYCLDGNERILVYEYMPQGTLSQHLFEWKEHNLRPLEWKKRLSIALDVARGVEYLHSLAQQTFIHRDLKPSNILLGDDMKAKVADFGLVRLAPADGKCVSVETRLAGTFGYLAPEYAVTGRVTTKADVFSFGVILMELITGRKALDETQPEDSMHLVTWFRRMQLSKDTFQKAIDPTIDLTEETLASVSTVAELAGHCCAREPHQRPDMGH

SEQ ID NO: 215 - protein, 272 aa, Medicago truncatula
SEKNILGQGGFGTVYKGELHDGTRIAVKRMMCGAIVGKGAAEFQSEIAVLTKVRHRHLVALLGYCLDGNEKLLVYEYMPQGTLSRYIFNWPEEGLEPLGWNKRLVIALDVARGVEYLHSLAHQSFIHRDLKPSNILLGDDMRAKVADFGLVRLAPEGKASIETRIAGTFGYLAPEYAVTGRVTTKVDVFSFGVILMELITGRKALDDSQPEDSMHLVAWFRRMYLDKDTFRKAIDPTIDINEETLASIHTVAELAGHCSAREPYQRPDMGHA

SEQ ID NO: 216 - protein, 262 aa, Solanum lycopersicum
VSVVYKGELHDGTKIAVKRMESGAMGTKGMNEFQAEIAVLTKVRHRHLVALLGSCVNGNERLLVYEYMPQGTLSQHLFEWQELGYKPLTWKQRVTIALDVARGVEYLHSLAQQSFIHRDLKPSNILLGDDMRAKVADFGLVRNAPDGKYSVETRLAGTFGYLAPEYAATGRVTTKVDVYAFGVVLMEIITGRKALDETMPDERSHLVTWFRRVLINKESLRKAIDSTLDPDDETYESISKVAELAGHCTAREPFQRPDMGHA

SEQ ID NO: 217 - protein, 273 aa, Solanum lycopersicum
SEDNILGRGGFGTVYRGELHDGTKIAVKRMENGIITGKGLAEFKSEIAVLTKVRHRHLVGLLGYCLDGNEKLLVYEYMPQGTLSSHLFDWAEEGLKPLEWTKRLTIALDVARGVEYLHSLAHQSFIHRDLKPSNILLGDDMRAKVADFGLVRLAPEGKGSIETRIAGTFGYLAPEYAVTGRVTTKVDVFSFGVILMELITGRKALDESQPEESMHLVTWFRRMHLNKDTFRKAIDPAINLSEETLASISTVAELAGHCSAREPYQRPDMGHAV

SEQ ID NO: 218 - protein, 254 aa, Arabidopsis thaliana
SNVIGSCPIGKLFKGTLSSGVEIAVASFATTTAKDWKDSTEIHFRKKIEMLSKINHKNFANLLGYCEEKEPFTRILIFEYAPNGSLFEHLHYKESEHLDWGMRLRIAMGLAYCLDHMHQLNPPIAHTNLVSSSLQLTEDYAVKVSDFSFGSSETETNINNNTVIDTHISALNPEDNIYSFGLLLFEMITGKLIESVNKPDSVDSSLVDFLRGETLAKMVDPTLESYDAKIENIGEVIKSCLRTDPKERPTMQEV

SEQ ID NO: 219 - protein, 139 aa, Arabidopsis thaliana
ATIYKGTLSTGSEIAVLAVASGSLQDWSEDHETQFQEKRLSQVNHKNFLNVIGYCHEDEPFNRMLVFEYAPNGSLFEHLHDQDAEHLDWPMRLRIVMGIAYCMEHMHNLNPKPISHTNLNSSSVYLATDYAAKVSDFTF

SEQ ID NO: 220 - protein, 250 aa, Oryza sativa
IIGCTSTCTLYKGTLSSGVEIAVASSLVTSADDWSKECESRYRRKITSLSKVSHKNFMNLLGYCEEEQPFTRVMVFEYAPNGTLFEYLHVREAEKLDWMTRLRISMGIAYCLEHMHQLKPPVVPRNFDSTTIYLTDDFAAKVSDLEFWSGAKEPNPATSNSSSSSDLENTVRKYGMVLLEMLTGRVPDSEEDGPLERLASRYFDGETRLAELIDPSIGSFSEEAARSLCEVVRSCIDPDPKRRPTMAEVA

SEQ ID NO: 221 - protein, 155 aa, Solanum lycopersicum
SNVIGSSSVCTLYKGTLSSGVEIAVISRTVASTKDWSKDMETHFRKKIDTLSKVNHKNFVSLLGFCEEEDPFTRMMVFEYAPNGTLFEHLHIREAEHLDWGMRMRITMGMAYCLEHMHNLSPSLPHKNLTSSAVYLTEDSAAKISDFGFWNETEA

SEQ ID NO: 222 - protein, 269 aa, Arabidopsis thaliana
FHNDSLIGSGGFGDVYKAILKDGSAVAIKKLIHVSGQGDREFMAEMETIGKIKHRNLVPLLGYCKVGDERLLVYEFMKYGSLEDVLHDPKKAGVKLNWSTRRKIAIGSARGLAFLHHNCSPHIIHRDMKSSNVLLDENLEARVSDFGMARLMSAMDTHLSVSTLAGTPGYVPPEYYQSFRCSTKGDVYSYGVVLLELLTGKRPTDSPDFGDNNLVGWVKQHAKLRISDVFDPELMKEDPALEIELLQHLKVAVACLDDRAWRRPTMVQV

SEQ ID NO: 223 - protein, 268 aa, Oryza sativa
AETLIGSGGFGEVYKAKLKDGSVVAIKKLIHFTGQGDREFTAEMETIGKIKHRNLVPLLGYCKIGDERLLVYEYMKHGSLDVVLHDKAKASVKLDWSARKKIAIGSARGLAFLHHSCIPHIIHRDMKSSNVLLDNNLDARVSDFGMARLMNALDTHLSVSTLAGTPGYVPPEYYQSFRCTTKGDVYSYGVVLLELLSGKKPIDPTEFGDNNLVGWVKQMVKENRSSEIFDPTLTDRKSGEAELYQYLKIACECLDDRPNRRPTMIQVM

SEQ ID NO: 224 - protein, 270 aa, Medicago truncatula
FHNDSLIGSGGFGDVYKAQLKDGSVVAIKKLIHVSGQGDREFTAEMETIGKIKHRNLVPLLGYCKVGEERLLVYEYMKYGSLEDVLHDPKKAGLKMNWSVRRKIAIGAARGLAFLHHSCIPHIIHRDMKSSNVLLDENLEARVSDFGMARMMSAMDTHLSVSTLAGTPGYVPPEYYQSFRCSTKGDVYSYGVVLLELLTGRRPTDSADFGDNNLVGWVKQHAKLKISDVFDPELMKEDPNMEIELLQHLKVACACLDDRPWRRPTMIQVM

SEQ ID NO: 225 - protein, 270 aa, Solanum lycopersicum
FHNDSLVGSGGFGDVYKAQLKDGSVVAIKKLIHVSGQGDREFTAEMETIGKIKHRNLVPLLGYCKVGEERLLVYEYMKYGSLEDVLHDRKKIGIKLNWPARRKIAIGAARGLAFLHHNCIPHIIHRDMKSSNVLLDENLEARVSDFGMARLMSAMDTHLSVSTLAGTPGYVPPEYYQSFRCSTKGDVYSYGVVLLELLTGKQPTDSADFGDNNLVGWVKLHAKGKITDVFDRELLKEDASIEIELLQHLKVACACLDDRHWKRPTMIQVM

SEQ ID NO: 226 - protein, 274 aa, Arabidopsis thaliana
KEENIIGKGGAGIVYRGSMPNNVDVAIKRLVGRGTGRSDHGFTAEIQTLGRIRHRHIVRLLGYVANKDTNLLLYEYMPNGSLGELLHGSKGGHLQWETRHRVAVEAAKGLCYLHHDCSPLILHRDVKSNNILLDSDFEAHVADFGLAKFLVDGAASECMSSIAGSYGYIAPEYAYTLKVDEKSDVYSFGVVLLELIAGKKPVGEFGEGVDIVRWVRNTEEEITQPSDAAIVVAIVDPRLTGYPLTSVIHVFKIAMMCVEEEAAARPTMREVVHM

SEQ ID NO: 227 - protein, 268 aa, Oryza sativa
KEENVIGKGGAGIVYKGAMPNGDHVAVKRLPAMGRGSSHDHGFSAEIQTLGRIRHRHIVRLLGFCSNNETNLLVYEYMPNGSLGELLHGKKGGHLHWDTRYKIAIEAAKGLCYLHHDCSPLILHRDVKSNNILLDSDFEAHVADFGLAKFLQDTGASECMSAIAGSYGYIAPEYAYTLKVDEKSDVYSFGVVLLELVTGRKPVGEFGDGVDIVQWVRMMTDSNKEQVMKVLDPRLSTVPLHEVMHVFYVALLCIEEQSVQRPTMREVV

SEQ ID NO: 228 - protein, 202 aa, Medicago truncatula
KEENIIGKGGAGIVYRGSMANGTDVAIKRLVGQGSGRNDYGFKAEIETLGRIRHRNIMRLLGYVSNKDTNLLLYEYMPNGSLGEWLHGAKGCHLSWEMRYKIAVEAAKGLCYLHHDCSPLIIHRDVKSNNILLDADFEAHVADFGLAKFLYDPGASQSMSSIAGSYGYIAPEYAYTLKVDEKSDVYSFGVVLLELIIGRKPV

SEQ ID NO: 229 - protein, 274 aa, Solanum lycopersicum
KEENIIGKGGAGVVYRGSMSNGIDVAIKKLVGRGTGHHDHGFSAEIQTLGRIRHRNIVRLLGYVSNKDTNLLLYEYMSNGSLGEMLHGAKGAHLKWETRYRIAVEAAKGLCYLHHDCSPSIIHRDVKSNNILLDSDYEAHVADFGLAKFLQDAGASECMSSIAGSYGYIAPEYAYTLKVDQKSDVYSFGVVLLELITGHKPVGEFGDGVDIVRWVNKTMSELSQPSDAASVLAVVDSRLHSYPLASVVNLFKIAMMCVEEESCARPSMREVVHM

SEQ ID NO: 230 - protein, 288 aa, Solanum lycopersicum
VASLEMIGKGGCGEVYRAELPGSNGKIIAIKKIIQSPMDAAEITEEDTKALNKKMRQVKSEIQIVGQIRHRNLLPLLAHMPRPDCHYLVYEYMKNGSLQDILQQVTEGTRELDWLGRHRIAAGVAAGLEYLHINHTQRIIHRDLKPANILLDDDMEARVADFGLAKAVPDAHTHITTSNVAGTVGFIAPEYYQTLKFTDKCDIYSFGVVLAVLVIGKGPSDDFFQHTSEMSLVKWLRNVMTSDDPKIAIDPKLIGNGYDEQMLLVLKIACFCTLDNPKERPNSKDVRC

SEQ ID NO: 231 - protein, 262 aa, Oryza sativa
TVIGKGGFGTVYKAQFSDGSIAAVKRMDKVSRQAEEEFCREMELLARLHHRHLVTLKGFCIERKERFLVYEYMANGSLKDHLHSSGRKALSWQSRLQIAMDVANALEYLHFFCNPPLCHRDIKSSNILLDENFVAKVADFGLAHASRTGAISFEAVNTDIRGTPGYMDPEYVITQELTEKSDIYSYGVLLLELVTGRRAIQDSRNLVEWAQGHLSSGKITPEFVDPTIRGLVDMDQLHLVVSIVQWCTQREGRERPSIRQVL

SEQ ID NO: 232 - protein, 262 aa, Medicago truncatula
TIIGQGGFGTVYKAHFSDGQVAAVKRMDRVSEQGEDDFCREIELLARLHHRHLVTLRGFCIKKQERFLLYEYMGNGSLKDHLHSPGKTPLSWRTRIQIAIDVANALEYLHFYCDPPLFHRDIKASNTLLDENFVAKIADFGLAQASKDGSICFEPVNTEIWGTPGYMDPEYIVTQELTEKSDIYSYGVLLLEIVTGRRAIQDNKNLVEWAKPYMESETRLLELVDPNVRESFDLDQLQTVISIVGWCTQREGRARPSIKQVL

SEQ ID NO: 233 - protein, 261 aa, Solanum lycopersicum
TTIGQGGFGTVYKAEFKDGSMVAVKRMNKVSEQAEDEFCREIELLARLHHRHLLALRGFCTERHERFLMYEYMPNGSLKDQLHNPGTTPLSWRTRIQIAIDVANALEYLHFYCDPPLCHRDIKSSNILLDENFVAKVADFGLAHASKDGSICFEPVNTEIKGTPGYMDPEYVITQELTEKSDVYSYGVVLLELITGRRAIQDNKNLIEWAEIFMTSESKITELVDLNIGDSYDFDQLQTLLAIVRWCTQREGRARPSIKQV

SEQ ID NO: 234 - protein, 260 aa, Arabidopsis thaliana
KYIIGHGASSTVYKCVLKNCKPVAIKRLYSHNPQSMKQFETELEMLSSIKHRNLVSLQAYSLSHLGSLLFYDYLENGSLWDLLHGPTKKKTLDWDTRLKIAYGAAQGLAYLHHDCSPRIIHRDVKSSNILLDKDLEARLTDFGIAKSLCVSKSHTSTYVMGTIGYIDPEYARTSRLTEKSDVYSYGIVLLELLTRRKAVDDESNLHHLIMSKTGNNEVMEMADPDITSTCKDLGVVKKVFQLALLCTKRQPNDRPTMHQV

SEQ ID NO: 235 - protein, 261 aa, Oryza sativa
KYIIGYGASSTVYKCVLKNCKPVAIKKLYAHYPQSLKEFETELETVGSIKHRNLVSLQGYSLSPAGNLLFYDYLENGSLWDVLHAGSSKKQKLDWEARLRIALGAAQGLAYLHHDCNPRIIHRDVKSKNILLDKDYEAHLADFGIAKSLCTSKTHTSTYVMGTIGYIDPEYACTSRLNEKSDVYSYGIVLLELLTGKKPVDNECNLHHLILSKAADNTVMEMVDPDIADTCKDLGEVKKVFQLALLCSKRQPSDRPTMHEV

SEQ ID NO: 236 - protein, 259 aa, Medicago truncatula
KYIVGSGASSTVYKCVLKNCKPVAIKRLYSHYPQYLKEFETELATVGSIKHRNLVCLQGYSLSPYGHLLFYDYMENGSLWDLLHGPSKKKKLDWHLRLKIALGAAQGLSYLHHDCSPRIIHRDVKSSNILLDSDFEPHLTDFGIAKSLCPTKSHTSTYIMGTIGYIDPEYARTSRLTEKSDVYSYGIVLLELLTGRKAVDNESNLHHLILSKTASNAVMETVDPDVTATCKDLGAVKKVFQLALLCTKRQPADRPTMHE

SEQ ID NO: 237 - protein, 261 aa, Solanum lycopersicum
KYIIGCGASSTVYKCVLKNCKPVAIKKLYSHNPQYLKEFETELETVGSIKHRNLVCLQGYSLSPSGHLLFYDYMENGSLWDLLHGPTTKKKKLDWVTRLRIALGSAQGLAYLHHDCSPRIIHRDVKSSNILLDKDFEAHLTDFGIAKSLCISKTYTSTYIMGTIGYIDPEYARTSRLTEKSDVYSYGIVLLELLTGRKAVDNESNLHHLILTKAANDAVMETVDPEITCTCKDLADVKKVFQLALLCSKRQPAERPTMHEV

SEQ ID NO: 238 - protein, 264 aa, Arabidopsis thaliana
SFKIGQGGFGAVYYAELRGEKAAIKKMDMEASKQFLAELKVLTRVHHVNLVRLIGYCVEGSLFLVYEYVENGNLGQHLHGSGREPLPWTKRVQIALDSARGLEYIHEHTVPVYVHRDIKSANILIDQKFRAKVADFGLTKLTEVGGSATRGAMGTFGYMAPETVYGEVSAKVDVYAFGVVLYELISAKGAVVKMTEAVGEFRGLVGVFEESFKETDKEEALRKIIDPRLGDSYPFDSVYKMAELGKACTQENAQLRPSMRYIVV

SEQ ID NO: 239 - protein, 269 aa, Oryza sativa
SIGNKIGQGGFGAVYYAELRGEKAAIKKMDMQATHEFLAELKVLTHVHHLNLVRLIGYCIESSLFLVYEFIENGNLSQHLRGMGYEPLSWAARIQIALDSARGLEYIHEHTVPVYIHRDIKSANILIDKNYRAKVADFGLTKLTEVGGTSMPTGTRVVGTFGYMPPEYARYGDVSPKVDVYAFGVVLYELISAKEAIVRSTESSSDSKGLVYLFEEALNSPDPKEGLRTLIDPKLGEDYPIDSILKLTQLAKVCTQEDPKLRPSMRSVV

SEQ ID NO: 240 - protein, 268 aa, Medicago truncatula
MANKIGQGGFGSVYYAELRGEKAAIKKMDMQATKEFLAELKVLTRVHHLNLVRLIGYSIEGSLFLVYEYIENGNLSQHLRGSGRDPLPWATRVQIALDSARGLEYIHEHTVPVYIHRDIKPANILIDKNFRGKVADFGLTKLTEVGSSSLPTGRLVGTFGYMPPEYAQYGDVSPKVDVYAFGVVLYELISAKEAIVKSSESVADSKGLVGLFEGVLSQPDPTEDLRKIVDPRLGDNYPADSVRKMAQLAKACTQENPQLRPSMRSIVV

SEQ ID NO: 241 - protein, 50 aa, Medicago truncatula
MYVGFSSSTGSILTSHYILGWSFKVNGQAQNLVISELPKLPTLDEKHDSK

SEQ ID NO: 242 - protein, 50 aa, Oryza sativa
SFIGFSSATGPINSRHYILGWSFGMNKPAPNIDIAKLPKLPRLAPKPQSK

SEQ ID NO: 243 - protein, 50 aa, Arabidopsis thaliana
AATGKDQSSAHYVMGWSFSSCGENPMADWLEISRLPPPPRLSNKKGYNSQ

SEQ ID NO: 244 - protein, 50 aa, Oryza sativa
TSADAKGCFMWTADLLDMRQFDNGGQDLFVRLAASDLPTNSVSDNSQTAK

SEQ ID NO: 245 - protein, 50 aa, Medicago truncatula
DGGIGCVMWLDELIDIRIYPAGGQDLFVRLAASDVGDDGVGGSSDHKIAR

SEQ ID NO: 246 - protein, 50 aa, Arabidopsis thaliana
ANADIRNGGSGCVIWTREILDMRNYAKGGQDLYVRLAAAELEDKRIKNEK

SEQ ID NO: 247 - protein, 50 aa, Oryza sativa
CNAYTYNSSGCFVWHGDLINLQDQYNGNGGGTLFLRLAASELPDSKKSKK

SEQ ID NO: 248 - protein, 50 aa, Medicago truncatula
YAYNSSGCFIWIGELLNLQQLSQDDSNGQTLFLKLAASEFHDSKSNKGTT

SEQ ID NO: 249 - protein, 50 aa, Medicago truncatula
FCRNFLGSLFDFQNLTALESGGGNGNVLYVRVPGNVSEGKIKGWNGKVLS

SEQ ID NO: 250 - protein, 16 aa, Oryza sativa
MSSGGGGGDDYKREES

SEQ ID NO: 251 - protein, 50 aa, Arabidopsis thaliana
SPPSPTTPSNPRSPPSPNQGPPNTPSGSTPRTPSNTKPSPPSDSSDGLST

SEQ ID NO: 252 - protein, 50 aa, Solanum lycopersicum
PPPPPPPPPPPPPPPPPPPPGSHPLTPHGHKSPPLPKNDRDSSNNNNHKP

SEQ ID NO: 253 - protein, 50 aa, Solanum lycopersicum
PSPLSPSPTPAVTAKPHVVHSPRSSPSPSSLPSPAENSSRVENARRSNHR

SEQ ID NO: 254 - protein, 50 aa, Medicago truncatula
PSPSPSPSSSETPQIVKKPASPDRNVSDSPSPLPTPGSVPQLKSNSNNHH

SEQ ID NO: 255 - protein, 50 aa, Arabidopsis thaliana
GDYKLLNLTWFEAPAPSQAPLVASSPHKAPSQGSSATTSVRSPGKKRHPN

SEQ ID NO: 256 - protein, 50 aa, Medicago truncatula
GGYKLLNIIWFEPPPPTQAPTLTASPEKAPLYHSPTATSPSSSTRGGHSN

SEQ ID NO: 257 - protein, 50 aa, Oryza sativa
GDYNLLNLTWFRPLVLAPAPTFTISPKPSPSQASTVPRHSADTSNEKHMS

SEQ ID NO: 258 - protein, 50 aa, Oryza sativa
PPSSGGGGNSPPSSGGGGGRSPSTPSTHPSPKSPASRSSGGGGSGVSTAT

SEQ ID NO: 259 - protein, 50 aa, Solanum lycopersicum
TTPSTPSPPARGNSPPSPSGGSPSPPSGGRPSPPAVSSPPSDEGSSGIST

SEQ ID NO: 260 - protein, 50 aa, Solanum lycopersicum
SNGNSWNSGSAPPPPPGTPPASRPHHKSGGNNSPSDGGSSGDGGGKSGIG

SEQ ID NO: 261 - protein, 50 aa, Medicago truncatula
WSSGPAPPPPPGTPLVPKSNQHHKTGGGRSTTGQDANSDTSNEGKKSGIG

SEQ ID NO: 262 - protein, 50 aa, Arabidopsis thaliana
KDGNSFNTGPAPPPPPGTPPIRGSPSRKSGGRESRSSDESTRNGDSKKSG

SEQ ID NO: 263 - protein, 50 aa, Oryza sativa
KKINNLQTDGNSWSNGPAPPPPPYSAPPPPNRPNSPGQNNGGSSSGGSSG

SEQ ID NO: 264 - protein, 50 aa, Arabidopsis thaliana
FLQTSLCGKPLKLCPDEETVPSQPTSGGNRTPPSVEGSEEKKKKNKLSGG

SEQ ID NO: 265 - protein, 50 aa, Medicago truncatula
LQTFSQDSFLGNSLCGRPLSLCPGTATDASSPFSADDGNIKNKNKNKLSG

SEQ ID NO: 266 - protein, 50 aa, Arabidopsis thaliana
ICSPLLRGPCTLNVPKPLVINPNSYGNGNNMPGNRASGGSGTFHRRMFLS

SEQ ID NO: 267 - protein, 50 aa, Medicago truncatula
SPLLTGPCKMNVPKPLVLDPHGYNDQMNPRIPRNESSESSSPIHHHRFLS

SEQ ID NO: 268 - protein, 50 aa, Solanum lycopersicum
LLKGPCKMNVPKPLVLDPYAYGNQSRGGQNGDDGASRSNNKSFKNHRFLS

SEQ ID NO: 269 - protein, 50 aa, Oryza sativa
SPLVTQPCRMNVAKPLVLDPNEYPHGGDGDNNLETSGRGPASPRKRRFLS

SEQ ID NO: 270 - protein, 50 aa, Arabidopsis thaliana
RSNVVVNTNGNPDIGKDKSSLSSPGSSSPSGGSGSGINGDKDRRGMKSST

SEQ ID NO: 271 - protein, 50 aa, Medicago truncatula
RSNVIVITSGNIDIGKDKSSLSPSVSPNGTNASGGNGGSSENGDRKSSSH

SEQ ID NO: 272 - protein, 50 aa, Oryza sativa
NVLVKANGNPNIGKDAPAPSGSGGSGGSNAPDGGNGGDGSNGSPSSSSAG

SEQ ID NO: 273 - protein, 50 aa, Arabidopsis thaliana
YPGLPASPPTSGMTIIDQGPYSGNNNGRAVKPLGVDVPRKPRKKELNGGS

SEQ ID NO: 274 - protein, 50 aa, Medicago truncatula
PGLPPSPPLPPSSVNMIDGGPYSNNGNNGRTIKPLGVDIQKRQHRSGLSK

SEQ ID NO: 275 - protein, 50 aa, Arabidopsis thaliana
KFLVFINLSKNNLNGSIPKALRDRENKGLKLIVDKNVDNCSSGSCTQKKK

SEQ ID NO: 276 - protein, 50 aa, Medicago truncatula
NNLNLTGSVSSGLLERSKQDGLLLILDQNPNICEPGSCNQKISDRKKSNK

SEQ ID NO: 277 - protein, 50 aa, Oryza sativa
LDLTGNQLNGSIPSGLLKRIQDGTLNIKYGNNPNLCTNDNSCQPAKHKSK

SEQ ID NO: 278 - protein, 50 aa, Oryza sativa
KPQYYNAILNGMEVFKLQLTNGSLAGLNPVPSIVPTASGGNSGKKSSVGP

SEQ ID NO: 279 - protein, 50 aa, Medicago truncatula
YYDAILNGVEIFKISDSKGNLAGTNPPPPQVQDLIDPSLARKSSKSKSHT

SEQ ID NO: 280 - protein, 50 aa, Solanum lycopersicum
CFFGVKGLIIPPGPSPSQLSPEVSPSPPAAASPTQLSLNTPVKENHHPYH

SEQ ID NO: 281 - protein, 50 aa, Medicago truncatula
GVQGLLRTPVSESSPSLPAPEVSPSPPVAADSPSQLLLGLPTKGKHHSYH

SEQ ID NO: 282 - protein, 50 aa, Arabidopsis thaliana
FQVTELNIPSESFSPVASPEPSPSTVGGISPSNSDSQMTTSRSTNPYHLT

SEQ ID NO: 283 - protein, 50 aa, Solanum lycopersicum
GVPKRYILAENSTRISAMGPASVPAPAPAPVNRVVPAMHKRKNKKRKLRS

SEQ ID NO: 284 - protein, 50 aa, Medicago truncatula
DTDNTAPKRYILAETNNSSQTRPHRSHSPGAAPAPAPAAPLHKHKKSRRK

SEQ ID NO: 285 - protein, 50 aa, Oryza sativa
HRYMLAEKGSNSTRANHTSPAASNSTPSATTTEAPAAGKHHRSHKHRVRN

SEQ ID NO: 286 - protein, 50 aa, Arabidopsis thaliana
RRCIDSGGICGSALDSESFRCLCADRPHNSSCDDNTNQGKNDKRRRVIVK

SEQ ID NO: 287 - protein, 50 aa, Medicago truncatula
YGECQRCIDSGGVCGNDGGTQFRCFCKDGSNTTSCNSEKATTSRSKRNRR

SEQ ID NO: 288 - protein, 50 aa, Solanum lycopersicum
SKCQQCEVSGGRCGSNPDSGDFTCHCENGTPSNDCNNVHRDLPGSVKIPT

SEQ ID NO: 289 - protein, 50 aa, Arabidopsis thaliana
LQDNSNCSMCVLSGGSCGYNQNSSLFVCYCKDGPQDNQCDINLDDIIGNR

SEQ ID NO: 290 - protein, 50 aa, Medicago truncatula
CSQGFFLSSPCTQNSDRVCTACSLCQNSSCLNVCKLHSSNGFWHWHHIRR

SEQ ID NO: 291 - protein, 50 aa, Arabidopsis thaliana
YFPSSTCNPNADRVCTPCSLCQNSSCYGICKIRATKSKEHEQKEQREVRR

SEQ ID NO: 292 - protein, 50 aa, Oryza sativa
DECNDGNNYPCTHKCINIAGGYNCTCPMGMTGDGKKQGIGCKRDTTMLST

SEQ ID NO: 293 - protein, 50 aa, Oryza sativa
DGCQDIDECTIKRPCTHKCINTKGSFYCMCPAGMRGDGLKEGSGCNGIGT

SEQ ID NO: 294 - protein, 50 aa, Solanum lycopersicum
NECENENPCDGICNNFPGGYSCTCPHGQIGDGKKDGHGCIPKNSKSPILQ

SEQ ID NO: 295 - protein, 50 aa, Solanum lycopersicum
CLQNVTSQRNRSECASFYSGRGLLFDNFGEPNATEPPPASKSNRKSHRNK

SEQ ID NO: 296 - protein, 50 aa, Medicago truncatula
DSNCLQNATNQKSTVECASFYAERGLSFDNFGQPNTTKATEGSGKSNKTK

SEQ ID NO: 297 - protein, 50 aa, Arabidopsis thaliana
RNERRQKPSAICAAFYKSRGLDFDDFGRPNLTQPTSKNASSGISRRTVII

SEQ ID NO: 298 - protein, 50 aa, Arabidopsis thaliana
YHKEKSNLCKILLESPNNLKNSSSWTGVSEDVLYIREPKKGNSKGNISKS

SEQ ID NO: 299 - protein, 50 aa, Solanum lycopersicum
YHNERTNLCKSLYGSLLNLRNLTSDGAVEDKLFVRVQGGGNTRKNQIQVR

SEQ ID NO: 300 - protein, 12 aa, Medicago truncatula
MVEDEDYRRKAK

SEQ ID NO: 301 - protein, 50 aa, Solanum lycopersicum
EGEVPVTGIFSNLSADVLSGNSKLCGGIQELHLQSCVYQKTRKKHVLALK

SEQ ID NO: 302 - protein, 50 aa, Oryza sativa
SFNSFVGEVPTIGAFAAASGISIQGNAKLCGGIPDLHLPRCCPLLENRKH

SEQ ID NO: 303 - protein, 50 aa, Medicago truncatula
MLDGEVPKEGVFGNASALAVTGNNKLCGGISHLHLPPCRVKRMKKKKHRN

SEQ ID NO: 304 - protein, 50 aa, Medicago truncatula
MLEGEVPTEGVFGNVSKLAVTGNNKLCGGISTLRLRPCPVKGIKPAKHQK

SEQ ID NO: 305 - protein, 50 aa, Solanum lycopersicum
NHLDGEVPVQGVFADARRIQVMGNMNLCGGIEELHLHPCLKHANKRPKKH

SEQ ID NO: 306 - protein, 50 aa, Oryza sativa
QLDGPVPTTGVFNATKDFFVGGNRVCGGVSELQLPKCPDRAGKGSHRSRT

SEQ ID NO: 307 - protein, 50 aa, Arabidopsis thaliana
VPTEGIFQNATLVSVFGNKNLCGSIKELKLKPCIAQAPPVETRHPSLLKK

SEQ ID NO: 308 - protein, 50 aa, Arabidopsis thaliana
VPTTGVFRNATAVSVFGNTNICGGVREMQLKPCIVQASPRKRKPLSVRKK

SEQ ID NO: 309 - protein, 50 aa, Solanum lycopersicum
MIPESAPFDTFPDYRFANNSLCGYPLPIPCSSGPKSDANQHQKSHRRQAS

SEQ ID NO: 310 - protein, 50 aa, Medicago truncatula
LIPESGQFDTFPPVKFLNNSGLCGVPLPPCGKDTGANAAQHQKSHRRQAS

SEQ ID NO: 311 - protein, 50 aa, Arabidopsis thaliana
SGPIPEMGQFETFPPAKFLNNPGLCGYPLPRCDPSNADGYAHHQRSHGRR

SEQ ID NO: 312 - protein, 50 aa, Oryza sativa
GPIPSSGQLTTFPPSRYDNNNGLCGIPLPPCGHNPPWGGRPRGSPDGKRK

SEQ ID NO: 313 - protein, 50 aa, Arabidopsis thaliana
HNNLVGDIPKNNNFSRFSPDSFIGNPGLCGSWLNSPCHDSRRTVRVSISR

SEQ ID NO: 314 - protein, 50 aa, Solanum lycopersicum
YNNLGGNIPTGNNFSRFSPDSFIGNPDLCGYWLTSPCHASHPAERVSISK

SEQ ID NO: 315 - protein, 50 aa, Oryza sativa
PGTGQFSYFNATSFVGNPGLCGPYLGPCRPGVAGTDHGGHGHGGLSNGVK

SEQ ID NO: 316 - protein, 50 aa, Solanum lycopersicum
RPTNGQLKFFNDTYFVGNPKLCSPHATFCPSASNSPQNALKIHAGKFTTT

SEQ ID NO: 317 - protein, 50 aa, Arabidopsis thaliana
RVPLGGQFLVFNETSFAGNTYLCLPHRVSCPTRPGQTSDHNHTALFSPSR

SEQ ID NO: 318 - protein, 50 aa, Medicago truncatula
NNFTGIVPTGGQFLVFNDRSFAGNPSLCFPHQTTCSSLLYRSRKSHAKEK

SEQ ID NO: 319 - protein, 50 aa, Solanum lycopersicum
TGLVPVNGSFSLFTPISFANNQLEVPPVSPPPPLPPTPSSSSSVGNSATG

SEQ ID NO: 320 - protein, 50 aa, Arabidopsis thaliana
LTGDIPVNGSFSLFTPISFANTKLTPLPASPPPPISPTPPSPAGSNRITG

SEQ ID NO: 321 - protein, 50 aa, Medicago truncatula
DLEGTVPVNGSFSLFTPISYQNNRRLIQPKNAPAPLSPPAPTSSGGSNTG

SEQ ID NO: 322 - protein, 50 aa, Oryza sativa
LFTPISFANNPSLCGPGTTKPCPGAPPFSPPPPYNPPTPVQSPGSSSSTG

SEQ ID NO: 323 - protein, 50 aa, Oryza sativa
FNLSELTRIGSSLSNQIYKPPANFGPYFFIADPYAPLAVALGGKKSKMST

SEQ ID NO: 324 - protein, 50 aa, Medicago truncatula
QYFNRTEVQRIGFSLSNQTYKPPHEFGPYYFIAFPYAFPDSHGGSSLSRG

SEQ ID NO: 325 - protein, 50 aa, Oryza sativa
FSEQDISGIGFILSNQTYKPPSNFGPYYFLGQTYSFANGALQTSKSNTNH

SEQ ID NO: 326 - protein, 50 aa, Oryza sativa
KSEVLRLRGMFTGWLIPDSDIFGPYELLNFNPGWYNNLFPDRAKSSLSTG

SEQ ID NO: 327 - protein, 50 aa, Medicago truncatula
ETEVQRIRSMFTGWNIPDSDLFGPYELINFNMGLYQNATSTSSKSGISTG

SEQ ID NO: 328 - protein, 50 aa, Arabidopsis thaliana
ARSSGVSADILQRYNPGVNFNSGNGIVYVPGRDPNGAFPPFKSSKQDGVG

SEQ ID NO: 329 - protein, 50 aa, Medicago truncatula
ANSSKVDSSLLQRYNPGVNFNQGSGIVFVPGKDQNGSFVFLGSSSGLGGG

SEQ ID NO: 330 - protein, 50 aa, Solanum lycopersicum
VSEDIIRRYNPAAVSILDIGQGIIYIPGRDRNGNFPPLPTSTDGLSGGAK

SEQ ID NO: 331 - protein, 50 aa, Oryza sativa
ATYGLSSQLDVVRRYNPGMESATGSGIVYIPVKDPNGSYLPLKSPGKGAS

SEQ ID NO: 332 - protein, 50 aa, Solanum lycopersicum
DVTVSSTLEIHLYWTGKGTNAIPDRGVYGPLISAITVTPNFRVDTGSGLP

SEQ ID NO: 333 - protein, 50 aa, Medicago truncatula
PFKDVVVTSNNTLEICLYWAGKGTQYIPNSSVYGPLISAISVKSDSPHGS

SEQ ID NO: 334 - protein, 50 aa, Arabidopsis thaliana
EIRLQWAGKGTQAIPVRGVYGPLISAVSVDPDFIPPKEPGTGTGGGSSVG

SEQ ID NO: 335 - protein, 50 aa, Oryza sativa
WAGRGTTGIPKRGYYGPLISAISVVPNFEVPLAVEPPQIGGSKKLSRISK

SEQ ID NO: 336 - protein, 50 aa, Medicago truncatula
KKTKYITGYEDPSLSSISFVKSCSDPFAVNPGIMKSPPSKPSPPRICVPC

SEQ ID NO: 337 - protein, 50 aa, Arabidopsis thaliana
TRYISGYSDPSLSSISYVKTCLDPIAVDPNNVSKESPVTVTKSHSICIPC

SEQ ID NO: 338 - protein, 50 aa, Solanum lycopersicum
GTPQCHMMNSRYVGGQSNPSLGSVTFIKTCSDPIAVLPPPVPAPRKVSQK

SEQ ID NO: 339 - protein, 50 aa, Arabidopsis thaliana
SSHGVYCYHFVVTYAAGIVNKKGPESDDALSCLFSLSLRSPLNSKKKRHT

SEQ ID NO: 340 - protein, 50 aa, Medicago truncatula
SQSLSCFYFAILYAAGIVNEFGPESNGAVTCAFSLPVYSQVGSGSKGHQG

SEQ ID NO: 341 - protein, 50 aa, Oryza sativa
ATTRNCFYLTVTYAAGISNVAGPTNPPTAACTLGLALSNPPAAPPKSHDT

SEQ ID NO: 342 - protein, 50 aa, Medicago truncatula
CLRNITEYLCAVMSNNSKSLLSERCDNPHASLCILDLDTKCNHMHCHREY

SEQ ID NO: 343 - protein, 50 aa, Solanum lycopersicum
NFSCYGFKSVDLCTSIISGAIIAERCNVTHASICTLDAGSKCRHMRCHRE

SEQ ID NO: 344 - protein, 22 aa, Solanum lycopersicum
IAVTILVFASLAIASLFVAFSY

SEQ ID NO: 345 - protein, 25 aa, Solanum lycopersicum
ILIVATAVSAVVFFAFGLILALYVI

SEQ ID NO: 346 - protein, 50 aa, Solanum lycopersicum
IPKSLEGMPAGAFGGNSLCGKPLEVCPGEETQPAIATGGIEIGNAHKKKK

SEQ ID NO: 347 - protein, 50 aa, Oryza sativa
YDVLYVTYQGLPPSPPTAPRMNNGLSNVNDPRLHPLAVDVGNHRETKSRG

SEQ ID NO: 348 - protein, 50 aa, Oryza sativa
AASPPSPTAPSPFAADDLVDARLAPWPPFAPWPAPGQLHHNRRGGGHPNP

SEQ ID NO: 349 - protein, 50 aa, Solanum lycopersicum
FRKNLILKYSGNPDIGKDKSDAPSQGSSPGVSTGSDDGNSQAARKKSNRR

SEQ ID NO: 350 - protein, 50 aa, Arabidopsis thaliana
GNGNGSSSCRANICIAVTNGSSSIFGERCNASHAFVCAVDSDIKCRNCHK

SEQ ID NO: 351 - protein, 50 aa, Oryza sativa
VDVTGQRSQAECQQFYAARGLPYNVSGPAPTPQPAMPASPGRKKGHKNLK

SEQ ID NO: 352 - protein, 22 aa, Solanum lycopersicum
LIIIVGSTAFGFLFCLAGLCLI

SEQ ID NO: 353 - protein, 50 aa, Solanum lycopersicum
PVCMACEKSGGLCWSETDYAEPTCLCQDRTYPYYCGFVGEQGDKRDIRVK

SEQ ID NO: 354 - protein, 50 aa, Medicago truncatula
PAISPPSGGGTTPSPPSRTPPSSDDSPSPPSSKTPPPPSPPSSSSISTGT

SEQ ID NO: 355 - protein, 50 aa, Arabidopsis thaliana
SSSPEPAPKHVSTKASTVSEPQKRSSTQDVSPSPSAPLANSPIPRNSHSS

SEQ ID NO: 356 - protein, 50 aa, Oryza sativa
FGVQGITIFPGPSSVTSTPASSPNVTTPVDAPAPKTKTVLQKHHQPYRIT

SEQ ID NO: 357 - protein, 50 aa, Oryza sativa
CGGPLGPCPGEVSPSPAPGEQPVSPTPANNGDKGGNGGESGKKSKKLSGG

SEQ ID NO: 358 - protein, 50 aa, Oryza sativa
GCALATTNDACTLVTNTHAALTAKRCSDSHGLICMINHEDRCYHDHCHKE

SEQ ID NO: 359 - protein, 50 aa, Solanum lycopersicum
KISARAFKVVGNPLICGQSSGNNCSAVYPEPLSFPPDSLEDQRARSKNHH

SEQ ID NO: 360 - protein, 22 aa, Solanum lycopersicum
VIIIVVPTVIGVFLIVCTSFIL

SEQ ID NO: 361 - protein, 22 aa, Solanum lycopersicum
ILIVGIVAGILIITIISTLFIC

SEQ ID NO: 362 - protein, 50 aa, Oryza sativa
AKALLTTGGPVTPSDDGQRVRRALAQLTAPPSDPAPAAPQKDSSSGLSST

SEQ ID NO: 363 - protein, 12 aa, Arabidopsis thaliana
MDDMNKEVSAQI

SEQ ID NO: 364 - protein, 50 aa, Arabidopsis thaliana
NECTTSSTIHRHNCSDPKTCRNKVGGFYCKCQSGYRLDTTTMSCKRKEFA

SEQ ID NO: 365 - protein, 50 aa, Solanum lycopersicum
ECIDRKPDYRCANDAICQNTEGNYTCICPPDFSGNGTVCNRDNPQRITHN

SEQ ID NO: 366 - protein, 50 aa, Arabidopsis thaliana
GASPPTETQVIPNPSPVPPPPAQPPPAQTPPPQLSEVPHAVNKKKSHKSK

SEQ ID NO: 367 - protein, 50 aa, Arabidopsis thaliana
SPHQTRHILAETPTSSPTNKPNNSTTSKAPKGAPKPGKLKKKKKKSKKKK

SEQ ID NO: 368 - protein, 50 aa, Oryza sativa
QKNGFGDCDACNGSGGQCRYINDSAAAFACLCSDGKLRRSTCPGSRSKSH

SEQ ID NO: 369 - protein, 50 aa, Oryza sativa
QSQGHCSYSQNRVFLDCLCSDGKVGNQDCRNSGASNSSTLRYSSLKGRMK

SEQ ID NO: 370 - protein, 50 aa, Arabidopsis thaliana
EDESFVNSPMNDSRFVSLTAGPRHFCGIREDNHEVECWGNSNFSLIPKGS

SEQ ID NO: 371 - protein, 22 aa, Solanum lycopersicum
IFGLAGAGMAVLCMSLVLGLYI

SEQ ID NO: 372 - protein, 50 aa, Oryza sativa
GNGGGEGGEQLVVCQPCKLPLNASRLVVGNGTSKNAAAPTDSGKNRKAVK

SEQ ID NO: 373 - protein, 50 aa, Arabidopsis thaliana
PPAQDPNPIFTHDDVTEPPLPPVIAKSPTSTLGTPSTIAKPLRNFLKVIR

SEQ ID NO: 374 - protein, 50 aa, Arabidopsis thaliana
CQECKTNGGICAYHVATPVCCKTNSSSEVNCTPMMPSGSSAHAGLSKKGK

SEQ ID NO: 375 - protein, 50 aa, Medicago truncatula
PSCNVRYELYPFYRNLAPSPSPAPSAAPALVPPSTSTPTLGGSSGISSGT

SEQ ID NO: 376 - protein, 50 aa, Arabidopsis thaliana
FLRWDLYTYSNAFDNLTVASPPPEPPVTVPQPAGDQDNPTNNDSKGISAG

SEQ ID NO: 377 - protein, 50 aa, Oryza sativa
GVRCSYRYEVNPFLNGLVMVHLTAPPIPTASPPAAAAAAAGEGKDYNVPR

SEQ ID NO: 378 - protein, 50 aa, Oryza sativa
RNTKLQYDGNSSSKTTADEFYALAVAKLPDKAWGLATGTDGFLQLTRKAT

SEQ ID NO: 379 - protein, 47 aa, Medicago truncatula
MEVNSSTTVPAGPPTISTKNHTFIHHYHHLHSEKDYHNHVGHFPFKT

SEQ ID NO: 380 - protein, 50 aa, Arabidopsis thaliana
GPNPNRPDPTNPTNFTTVDVKPESADLQRSNCSNNNGGCSSKSLKSSPLG

SEQ ID NO: 381 - protein, 50 aa, Solanum lycopersicum
SSLKLCTVSSLNQNRPQPFEPGSNRLPTKDIPESANVQTKQTSQSRKSQT

SEQ ID NO: 382 - protein, 50 aa, Oryza sativa
LCLSSEDGLKPSKPEPFGPDGTVKTRQVPQSANTDNHCEGSGCSKSSNAS

SEQ ID NO: 383 - protein, 50 aa, Medicago truncatula
CNASDHVNPNRPEPYGAGVGSMSKEIPETADIKLPCNTTRCQNSSKSKKT

SEQ ID NO: 384 - protein, 50 aa, Solanum lycopersicum
PEELLEKSRNGSLDLRYDEFSPPPPPKDEISPPPKDEFLPPKDGNNLSAG

SEQ ID NO: 385 - protein, 50 aa, Solanum lycopersicum
IGTLLLVDGQTGNSVWSSDQTPATNVVAQLLDSGNFVIRPENDDREQSYL

SEQ ID NO: 386 - protein, 50 aa, Arabidopsis thaliana
TATKSQESSVVYVSGASPEIPISQASPRMGAQSPGPPIVKVVLRQDLNKK

SEQ ID NO: 387 - protein, 50 aa, Arabidopsis thaliana
ISREVMRLSIVYSQPDQQLNVTLFPAEIPVPPLKPLLSLNRDLSPYLLEK

SEQ ID NO: 388 - protein, 50 aa, Oryza sativa
SSKIIAHRSPHHPFTTPPQLVRPKPTTRRAEHDHSVETTGRSWFKRSWTT

SEQ ID NO: 389 - protein, 50 aa, Arabidopsis thaliana
YAYDNENNTFRCSNSPNYVITFCPNDISSMSQPSKETNGGTKQKSSWKLK

SEQ ID NO: 390 - protein, 23 aa, Solanum lycopersicum
VIAVIVLSASVAVILCCAVAWVL

SEQ ID NO: 391 - protein, 22 aa, Oryza sativa
AFLVAMPILAMCAALFVGIYWI

SEQ ID NO: 392 - protein, 24 aa, Solanum lycopersicum
LLVIEMICGFVVILSVGIGTFLLF

SEQ ID NO: 393 - protein, 22 aa, Arabidopsis thaliana
AAILGIAIGGLVILLMVLIAAC

SEQ ID NO: 394 - protein, 20 aa, Solanum lycopersicum
AAILGIALGGLVILLMILVA

SEQ ID NO: 395 - protein, 23 aa, Medicago truncatula
AIGGIAVGIVVVLLLVAAAIYFG

SEQ ID NO: 396 - protein, 23 aa, Medicago truncatula
AIMIIGLPLISLCLILMVAIAIF

SEQ ID NO: 397 - protein, 24 aa, Oryza sativa
VLVILLPIAIAAFILSVGIAMVFL

SEQ ID NO: 398 - protein, 23 aa, Solanum lycopersicum
LSLGLCFGFLALVISATWIYLGI

SEQ ID NO: 399 - protein, 22 aa, Oryza sativa
VGGSLGLMAVLIVLGFWTYWIV

SEQ ID NO: 400 - protein, 25 aa, Solanum lycopersicum
AAVAFGASFGATFLVIVVISLVLWW

SEQ ID NO: 401 - protein, 24 aa, Medicago truncatula
VAIVGGIVGGAAFILILSIVIYLF

SEQ ID NO: 402 - protein, 24 aa, Arabidopsis thaliana
VPLVVGCVGGAFFLLLVATGLYFF

SEQ ID NO: 403 - protein, 21 aa, Medicago truncatula
AIGIMVGGATIIFLVLGTCYL

SEQ ID NO: 404 - protein, 23 aa, Solanum lycopersicum
IFFVIGVTAGVAFAIIIVFGWSY

SEQ ID NO: 405 - protein, 25 aa, Oryza sativa
AIAGIAIGSAVGAALLLFLLICLCC

SEQ ID NO: 406 - protein, 25 aa, Medicago truncatula
GAIAGIVIGSVVGLLLLVFLLIFLC

SEQ ID NO: 407 - protein, 24 aa, Arabidopsis thaliana
AIAGIVIGCVVGFALIVLILMVLC

SEQ ID NO: 408 - protein, 28 aa, Solanum lycopersicum
LSGGAIAGIVVGSVLGFVLLLLILFVLC

SEQ ID NO: 409 - protein, 26 aa, Arabidopsis thaliana
AGVIAGIVIGVIVALLLILFIVYYAY

SEQ ID NO: 410 - protein, 23 aa, Oryza sativa
IIGIACGSSGGILLIVSIFIFAW

SEQ ID NO: 411 - protein, 22 aa, Arabidopsis thaliana
IIGSSIGVSILLLLSFVIFHFW

SEQ ID NO: 412 - protein, 22 aa, Solanum lycopersicum
LFIGIGVSVGLLLLLMLVFLIS

SEQ ID NO: 413 - protein, 21 aa, Oryza sativa
LLIGIVTGLALLLLLLVLIFW

SEQ ID NO: 414 - protein, 23 aa, Arabidopsis thaliana
VAIGVSVGIALLLLLFIVSLSWF

SEQ ID NO: 415 - protein, 25 aa, Arabidopsis thaliana
VVSGICIGIASLLLIIIVASLCWFM

SEQ ID NO: 416 - protein, 25 aa, Medicago truncatula
FIVIGASVAGFGVTMFFIIMISCYF

SEQ ID NO: 417 - protein, 21 aa, Medicago truncatula
VIGIAVGAVVVLVFFSICCIC

SEQ ID NO: 418 - protein, 24 aa, Arabidopsis thaliana
GVVVGIAIGGVAILVILTLICLLC

SEQ ID NO: 419 - protein, 22 aa, Solanum lycopersicum
GVVVGIAIGGVLILAILSLLFI

SEQ ID NO: 420 - protein, 22 aa, Oryza sativa
VVGVAVGGLVLLLLASFICLCC

SEQ ID NO: 421 - protein, 25 aa, Oryza sativa
MIIGAVVGGVAAALIILAIVLFIVF

SEQ ID NO: 422 - protein, 22 aa, Oryza sativa
YGFIAAGIAALLIISAAGAFYC

SEQ ID NO: 423 - protein, 22 aa, Solanum lycopersicum
ILIVGIVAGILIITIISTLFIC

SEQ ID NO: 424 - protein, 23 aa, Arabidopsis thaliana
LILIFSIAAGVLILAIITVLVIC

SEQ ID NO: 425 - protein, 27 aa, Medicago truncatula
LFLILGIAIGMLFIAIVSILIFCLCTL

SEQ ID NO: 426 - protein, 25 aa, Oryza sativa
LITIICIFIGALIAVLVIAMFICFC

SEQ ID NO: 427 - protein, 24 aa, Solanum lycopersicum
VLILSAAIGGSVLLLILIAGTIVF

SEQ ID NO: 428 - protein, 26 aa, Oryza sativa
YILIGAICGGVLLVAVIAAILYCLVC

SEQ ID NO: 429 - protein, 24 aa, Solanum lycopersicum
AIAGGVAAGAALLFAAPAIFLAWW

SEQ ID NO: 430 - protein, 24 aa, Arabidopsis thaliana
AIAGGVAAGAALLFAVPAIALAWW

SEQ ID NO: 431 - protein, 23 aa, Medicago truncatula
AIAGGVAAGAALLFAAPAIALAY

SEQ ID NO: 432 - protein, 23 aa, Oryza sativa
AIAGGVAAGAALLFAIPAIGFAW

SEQ ID NO: 433 - protein, 23 aa, Oryza sativa
AGAIAGGVVAGVVVLAAIFLYII

SEQ ID NO: 434 - protein, 25 aa, Oryza sativa
GAIAGIAVAGGVLVIALIFMSLFAL

SEQ ID NO: 435 - protein, 25 aa, Arabidopsis thaliana
AIIAGAASGAVVLALIIGFCVFGAY

SEQ ID NO: 436 - protein, 22 aa, Oryza sativa
IIGGVIGGLVVLALGCCCFFVI

SEQ ID NO: 437 - protein, 22 aa, Solanum lycopersicum
AGISIGAIGVVLLLAGLVYVGC

SEQ ID NO: 438 - protein, 23 aa, Medicago truncatula
GIIAGGIGGGVALLLLIGLFAFG

SEQ ID NO: 439 - protein, 23 aa, Oryza sativa
IIAGSVVGAIAGVGLLAALGFYC

SEQ ID NO: 440 - protein, 26 aa, Solanum lycopersicum
VGIVVFSVIGGVFMLCLIGAAAFCLY

SEQ ID NO: 441 - protein, 25 aa, Medicago truncatula
VGLIVLAVIGTVFVASLIGLLVFCL

SEQ ID NO: 442 - protein, 27 aa, Arabidopsis thaliana
FIGIIVGSVLGGLLSIFLIGLLVFCWY

SEQ ID NO: 443 - protein, 24 aa, Medicago truncatula
AIVGIVLGAIACAVTLSAIVTLLI

SEQ ID NO: 444 - protein, 24 aa, Oryza sativa
AIVGIVVAAFAAAAFLSSLITLII

SEQ ID NO: 445 - protein, 21 aa, Medicago truncatula
AVVIAIVFATAVLMVIVTLHM

SEQ ID NO: 446 - protein, 25 aa, Oryza sativa
VAVTAACVGVAALVVAGLVLYLAVV

SEQ ID NO: 447 - protein, 24 aa, Oryza sativa
AVVWIIVAAGVVGAVLALCVLTLW

SEQ ID NO: 448 - protein, 22 aa, Arabidopsis thaliana
IVSWSVAGVVLFLVLLTLVFCF

SEQ ID NO: 449 - protein, 26 aa, Oryza sativa
IPLIVGASVGGAAVIAALLALTICIA

SEQ ID NO: 450 - protein, 25 aa, Medicago truncatula
ISAGAVVGIVVAATTVIILVFGILW

SEQ ID NO: 451 - protein, 23 aa, Solanum lycopersicum
VGAVIGIVLASIVVLLLVLFALW

SEQ ID NO: 452 - protein, 23 aa, Arabidopsis thaliana
TVVGSVIASTVFLVLLIGGILWW

SEQ ID NO: 453 - protein, 23 aa, Medicago truncatula
IGIVAGAVGGIGVLLVLVLIVVI

SEQ ID NO: 454 - protein, 23 aa, Solanum lycopersicum
GGAIAGIVISVLVVGAIVAFFVI

SEQ ID NO: 455 - protein, 25 aa, Oryza sativa
IGGGGVAGIIISLLVVGAVVAFFVI

SEQ ID NO: 456 - protein, 23 aa, Medicago truncatula
GGGIVGIVISVIVVGAIVAFFLV

SEQ ID NO: 457 - protein, 27 aa, Arabidopsis thaliana
GIGAGAIAGIIISLLVVTALLVAFFLF

SEQ ID NO: 458 - protein, 24 aa, Arabidopsis thaliana
MYIIVGVLVGVLGVMAALVAFFFL

SEQ ID NO: 459 - protein, 22 aa, Solanum lycopersicum
IFGLAGAGMAVLCMSLVLGLYI

SEQ ID NO: 460 - protein, 23 aa, Medicago truncatula
LVFGLTGAGVALFVMCSLLGLYV

SEQ ID NO: 461 - protein, 25 aa, Arabidopsis thaliana
VALALGITGAIFGALVIAGLICLYF

SEQ ID NO: 462 - protein, 23 aa, Solanum lycopersicum
VAVGVTTAAFTAIVACVIFFLYY

SEQ ID NO: 463 - protein, 25 aa, Medicago truncatula
LAGWILGFVAGAFAGILSGFVFSLL

SEQ ID NO: 464 - protein, 22 aa, Arabidopsis thaliana
VAAWILGFVVGAIGGTISGFVF

SEQ ID NO: 465 - protein, 23 aa, Oryza sativa
WIIGFVVGSLAGVVSGLAMSVLF

SEQ ID NO: 466 - protein, 23 aa, Solanum lycopersicum
WFLGFLAGTFAGGISAVLCSLLF

SEQ ID NO: 467 - protein, 27 aa, Arabidopsis thaliana
MYLGFTASTGSVGAIHYLMGWLVNGVI

SEQ ID NO: 468 - protein, 22 aa, Arabidopsis thaliana
VLIGASAAVVGLIAASIFWYVY

SEQ ID NO: 469 - protein, 24 aa, Arabidopsis thaliana
IGIGFASGFLGATLIGGCLLCIFI

SEQ ID NO: 470 - protein, 24 aa, Medicago truncatula
VIIGIAAVSTFVVLCLIGLAVYAI

SEQ ID NO: 471 - protein, 24 aa, Medicago truncatula
LIGAASGTFVIFAFVQLGIVFFIC

SEQ ID NO: 472 - protein, 24 aa, Arabidopsis thaliana
LVGATSTTLVLFLGFQLGIVVYIY

SEQ ID NO: 473 - protein, 21 aa, Medicago truncatula
IVAIVVPISVATLLLIVGVCF

SEQ ID NO: 474 - protein, 24 aa, Oryza sativa
LVEIIVPSVVALLLLLAGLVICVI

SEQ ID NO: 475 - protein, 25 aa, Solanum lycopersicum
ALAGIIASVVVLGVLALLLLLWFII

SEQ ID NO: 476 - protein, 25 aa, Medicago truncatula
FLLMAVIVSVISFVIIMLLIVAIYL

SEQ ID NO: 477 - protein, 22 aa, Medicago truncatula
IIAGIVSAVSILLTATIILTIY

SEQ ID NO: 478 - protein, 22 aa, Solanum lycopersicum
VIIIVVPTVIGVFLIVCTSFIL

SEQ ID NO: 479 - protein, 24 aa, Arabidopsis thaliana
VVVAITVPTVIAILILLVLGFVLF

SEQ ID NO: 480 - protein, 22 aa, Solanum lycopersicum
IAVTILVFASLAIASLFVAFSY

SEQ ID NO: 481 - protein, 26 aa, Medicago truncatula
IAVVAIVVLASLAVFATFVAFSYYCY

SEQ ID NO: 482 - protein, 25 aa, Oryza sativa
VALMVIVSLAALSLLSLVAAFAYYC

SEQ ID NO: 483 - protein, 26 aa, Arabidopsis thaliana
VAIIIGIFVALCTIGGFIAFLVLLCP

SEQ ID NO: 484 - protein, 22 aa, Oryza sativa
VIYATAIPVAFLLLASLLAFLV

SEQ ID NO: 485 - protein, 18 aa, Arabidopsis thaliana
IFVRVISLIMTLMMMTLQ

SEQ ID NO: 486 - protein, 25 aa, Arabidopsis thaliana
VIVLIVALSIVTLVLLVLLFIFVMY

SEQ ID NO: 487 - protein, 27 aa, Medicago truncatula
IVPLVASVAGIFVLLVLVSGAAIICAL

SEQ ID NO: 488 - protein, 26 aa, Oryza sativa
VLIVSVSVGSFVALVLIAGALFVCVL

SEQ ID NO: 489 - protein, 23 aa, Solanum lycopersicum
FILTIVFAASFSILSLLLVFLCW

SEQ ID NO: 490 - protein, 25 aa, Oryza sativa
VIGASILVGVALSVLILLLLLVTLC

SEQ ID NO: 491 - protein, 23 aa, Oryza sativa
FPVLPISVSLAAALAILSSLYLL

SEQ ID NO: 492 - protein, 22 aa, Medicago truncatula
WVLIIGSSVLCLLLILTCGCIL

SEQ ID NO: 493 - protein, 27 aa, Solanum lycopersicum
IALILLLALGTSAACLTLLLLVSYCCV

SEQ ID NO: 494 - protein, 23 aa, Oryza sativa
LVLAILLPTIAALVLINILVWLC

SEQ ID NO: 495 - protein, 23 aa, Arabidopsis thaliana
IVITVIAAITGLILISVAIRQMN

SEQ ID NO: 496 - protein, 21 aa, Arabidopsis thaliana
LIVGVSAALTLMILIVVVIIV

SEQ ID NO: 497 - protein, 25 aa, Medicago truncatula
LALVPCIAIAVTAVAFVMFIVLMIL

SEQ ID NO: 498 - protein, 24 aa, Arabidopsis thaliana
MVPTIGIVVTAVALTMLVVLVILI

SEQ ID NO: 499 - protein, 27 aa, Solanum lycopersicum
LTLVPVIGIVVTVVAVLMLFILIVLIW

SEQ ID NO: 500 - protein, 23 aa, Oryza sativa
VIPGIGIAVILLAVLLQLVLVIL

SEQ ID NO: 501 - protein, 20 aa, Arabidopsis thaliana
FPLLIVALTVSLILVSTVVI

SEQ ID NO: 502 - protein, 24 aa, Oryza sativa
VIGASTAGAILVTLIVIIGILLIL

SEQ ID NO: 503 - protein, 24 aa, Medicago truncatula
LIILAVVSGLILLTTLAVVVWLLV

SEQ ID NO: 504 - protein, 26 aa, Solanum lycopersicum
YLIILAVVSGLILCTTLAIVIWLLVF

SEQ ID NO: 505 - protein, 26 aa, Oryza sativa
YFIVLVVVSGFILLTTLAVVVWLLVY

SEQ ID NO: 506 - protein, 26 aa, Arabidopsis thaliana
YLVILAVVSGLILFTTFAIILWLLVY

SEQ ID NO: 507 - protein, 25 aa, Arabidopsis thaliana
IIILCSVVGSISVLGFTLLVPLILL

SEQ ID NO: 508 - protein, 25 aa, Medicago truncatula
IILAAVLGGLGLLAILALLLVLLIL

SEQ ID NO: 509 - protein, 26 aa, Solanum lycopersicum
IILVAVLGSVGLLALVFICILLLIFC

SEQ ID NO: 510 - protein, 25 aa, Arabidopsis thaliana
LAAVGGGVAFILLFVILPIILVLCM

SEQ ID NO: 511 - protein, 23 aa, Arabidopsis thaliana
ILIALIVSSSLLCVTVMFLVYLL

SEQ ID NO: 512 - protein, 22 aa, Arabidopsis thaliana
WTTILLVTTIGFLVILLGVACI

SEQ ID NO: 513 - protein, 24 aa, Solanum lycopersicum
LAGSVAMGLLFSLFCIFGLIIVAI

SEQ ID NO: 514 - protein, 23 aa, Medicago truncatula
LVGSVAMGLLFSLFCVFGLIIIA

SEQ ID NO: 515 - protein, 25 aa, Arabidopsis thaliana
PASLAGSVAMGLLFSFVCIFGLILV

SEQ ID NO: 516 - protein, 22 aa, Solanum lycopersicum
LIIIVGSTAFGFLFCLAGLCLI

SEQ ID NO: 517 - protein, 23 aa, Arabidopsis thaliana
LVIIIGCSVLGFLVMLIGLSFIP

SEQ ID NO: 518 - protein, 22 aa, Oryza sativa
LYIIAGISSVLLLCLLSFPCLF

SEQ ID NO: 519 - protein, 25 aa, Solanum lycopersicum
ILIVATAVSAVVFFAFGLILALYVI

SEQ ID NO: 520 - protein, 19 aa, Oryza sativa
LLIVLGLLACSIAFAVGAI

SEQ ID NO: 521 - protein, 24 aa, Solanum lycopersicum
AVVVGVIALFVAVAVTGLFTFSLY

SEQ ID NO: 522 - protein, 23 aa, Arabidopsis thaliana
IVMGLIGSILAVAIFGGSTFTWY

SEQ ID NO: 523 - protein, 25 aa, Medicago truncatula
GVVIGCVLFLVLVLGVVAVTLVVLA

SEQ ID NO: 524 - protein, 23 aa, Oryza sativa
VGVLVVGVVAVVIGAAFCGIFAF

SEQ ID NO: 525 - protein, 24 aa, Medicago truncatula
GIIAIIALSSFLAIVLCSAAVFAL

SEQ ID NO: 526 - protein, 22 aa, Oryza sativa
IIVIIVLSSVFAFILCSGAALV

SEQ ID NO: 527 - protein, 24 aa, Arabidopsis thaliana
IAVIVLSAAAFIGLCFVIVWFLVF

SEQ ID NO: 528 - protein, 23 aa, Solanum lycopersicum
VIAVIVLSASVAVILCCAVAWVL

SEQ ID NO: 529 - protein, 23 aa, Solanum lycopersicum
VSSIVAISAAAVIAVGVMIITLL

SEQ ID NO: 530 - protein, 27 aa, Arabidopsis thaliana
VSVIVAISAAILIFSGVIIITLLNASV

SEQ ID NO: 531 - protein, 27 aa, Oryza sativa
VSAMVAICAAVFIILGVIVITLLNMSA

SEQ ID NO: 532 - protein, 23 aa, Medicago truncatula
ISAIIAISAIIVIVIGVIAISLV

SEQ ID NO: 533 - protein, 23 aa, Solanum lycopersicum
AAIVAAVCIAVLAIISVPIIYCL

SEQ ID NO: 534 - protein, 22 aa, Medicago truncatula
ASITVGIVLATIAVSAIAILSF

SEQ ID NO: 535 - protein, 27 aa, Oryza sativa
LAIYVAVPVVLVLVIVSVTILLFCLLG

SEQ ID NO: 536 - protein, 23 aa, Solanum lycopersicum
QLVITIIILVTVALLLAVTVLFI

SEQ ID NO: 537 - protein, 23 aa, Medicago truncatula
IIIIITMVALIMLLFTIFLVVCL

SEQ ID NO: 538 - protein, 29 aa, Solanum lycopersicum
ICVACLLEVAAASIVVFFMLQFSIGVYLF

SEQ ID NO: 539 - protein, 24 aa, Oryza sativa
LFTILPASALAIGVVLLVAVVVIL

SEQ ID NO: 540 - protein, 23 aa, Solanum lycopersicum
WQSFDYPTNTLLPGMKLGWDSKS

SEQ ID NO: 541 - protein, 49 aa, Artificial Sequence
  Synthetic amino aicid sequence
SFEGNAGLCGLPLKESCFGTGAPPMYHQKQEDKEEEEAEEDEQEVLNGR

SEQ ID NO: 542 - protein, 50 aa, Arabidopsis thaliana
TFDERSYIGNAHLCGLPTNKNCISQRVPEPPSVSTHAKEEENEEEGNVID

SEQ ID NO: 543 - protein, 50 aa, Arabidopsis thaliana
SFEGNAGLCGLPLKESCFGTGAPPMYHQKQEDKEEEEEEEEEEEEVLNGR

SEQ ID NO: 544 - protein, 50 aa, Arabidopsis thaliana
VPLGTQFQSQHCSTFMDNLRLYGLEKICGKAHAPSSTPLESEEFSEPEEQ

SEQ ID NO: 545 - protein, 50 aa, Arabidopsis thaliana
TGQPKSSFEGNAGLCGFPLQESCFGTNAPPAQKPKEEEEAEEDEQELNWK

SEQ ID NO: 546 - protein, 50 aa, Solanum lycopersicum
KGKQFDSFGNTSYQGNDGLRGFPLSKLCGGDDQVTTPAELDQEEEEEDSP

SEQ ID NO: 547 - protein, 50 aa, Solanum lycopersicum
NQFQTFSADSFEGNSGLCGLPLNNSCQSNGSASESLPPPTPLPDSDDEWE

SEQ ID NO: 548 - protein, 25 aa, Arabidopsis thaliana
MVWFYWTCAAVYISTSLALFAFLYI

SEQ ID NO: 549 - protein, 23 aa, Arabidopsis thaliana
AVAIGYGSGLLLGLAIAQVIASY

SEQ ID NO: 550 - protein, 22 aa, Arabidopsis thaliana
VINWIAAAIAYGPGVFCGLVIG

SEQ ID NO: 551 - protein, 23 aa, Arabidopsis thaliana
AVAIGYGVGVLLGLAIAQLIASY

SEQ ID NO: 552 - protein, 26 aa, Solanum lycopersicum
MISWQGVLVGYGCGLVIGLSLIYIMW

SEQ ID NO: 553 - protein, 22 aa, Solanum lycopersicum
FIFAAVGYIVGAANTISVVWFY

SEQ ID NO: 554 - protein, 38 aa, Arabidopsis thaliana
MRTDERRRWWVKPKKHITLVFITITMIIQFQMKGCVSC

SEQ ID NO: 555 - protein, 22 aa, Arabidopsis thaliana
MSKALLHLHFLSLFLLCCVCHS

SEQ ID NO: 556 - protein, 30 aa, Arabidopsis thaliana
MIPSQSNSFSGSVITLYFFLLGSLVLRTLA

SEQ ID NO: 557 - protein, 21 aa, Arabidopsis thaliana
MSKSLLRLTFLLLLLLSCVSP

SEQ ID NO: 558 - protein, 21 aa, Solanum lycopersicum
MGCVKLVFFMLYVFLFQLVSS

SEQ ID NO: 559 - protein, 22 aa, Solanum lycopersicum
MKMMATLYFLWLLLIPSFQILS

SEQ ID NO: 560 - protein, 778 aa, Arabidopsis thaliana
SIFTLNFHFTGIVACRPHQIQAFTKFTNEFDTRGCNNSDTFNGVWCDNSTGAVAVLQLRKCLSGTLKSNSSLFGFHQLRYVDLQNNNLTSSSLPSGFGNLKRLEGLFLSSNGFLGQVPSSFSNLTMLAQLDLSYNKLTGSFPLVRGLRKLIVLDLSYNHFSGTLNPNSSLFELHQLRYLNLAFNNFSSSLPSKFGNLHRLENLILSSNGFSGQVPSTISNLTRLTKLYLDQNKLTSSFPLVQNLTNLYELDLSYNKFFGVIPSSLLTLPFLAHLALRENNLAGSVEVSNSSTSSRLEIMYLGSNHFEGQILEPISKLINLKHLDLSFLNTSYPIDLKLFSSLKSLRSLDLSGNSISSASLSSDSYIPLTLEMLTLRHCDINEFPNILKTLKELVYIDISNNRMKGKIPEWLWSLPLLQSVTLGNNYFTGFQGSAEILVNSSVLLLYLDSNNFEGALPDLPLSIKGFGVASNSFTSEIPLSICNRSSLAAIDLSYNNFTGPIPPCLRNLELVYLRNNNLEGSIPDALCDGASLRTLDVSHNRLTGKLPRSFVNCSSLKFLSVINNRIEDTFPFWLKALPNLQVLTLRSNRFYGPISPPHQGPLGFPELRIFEISDNKFTGSLPPNYFVNWKASSRTMNQDGGLYMVYEEKLFDEGGYGYTDALDLQYKGLHMEQAKALTSYAAIDFSGNRLEGQIPESIGLLKALIAVNISNNAFTGHIPLSMANLENLESLDMSRNQLSGTIPNGLGSISFLAYINVSHNQLTGEIPQGTQITGQSKS

SEQ ID NO: 561 - protein, 271 aa, Oryza sativa
SNFCNKLGQGGFGSVYLGTLPDGSRIAVKKLEGIGQGKKEFRSEVTIIGSIHHIHLVKLRGFCTEGPHRLLAYEYMANGSLDKWIFHSKEDDHLLDWDTRFNIALGTAKGLAYLHQDCDSKIVHCDIKPENVLLDDNFIAKVSDFGLAKLMTREQSHVFTTLRGTRGYLAPEWLTNYAISEKSDVYSYGMVLLEIIGGRKSYDPSEISEKAHFPSFAFKKLEEGDLQDIFDAKLKYNDKDGRVETAIKVALWCIQDDFYQRPSMSKVVQML

SEQ ID NO: 562 - protein, 281 aa, Arabidopsis thaliana
LNEKYTIGRGAHGIVYRASLGSGKVYAVKRLVFASHIRANQSMMREIDTIGKVRHRNLIKLEGFWLRKDDGLMLYRYMPKGSLYDVLHGVSPKENVLDWSARYNVALGVAHGLAYLHYDCHPPIVHRDIKPENILMDSDLEPHIGDFGLARLLDDSTVSTATVTGTTGYIAPENAFKTVRGRESDVYSYGVVLLELVTRKRAVDKSFPESTDIVSWVRSALSSSNNNVEDMVTTIVDPILVDELLDSSLREQVMQVTELALSCTQQDPAMRPTMRDAVKLL

SEQ ID NO: 563 - protein, 264 aa, Arabidopsis thaliana
IKGSVYRATINGDDAAVKVIKGDVSSSEINLLKKLNHSNIIRLSGFCIREGTSYLVFEYSENGSISDWLHSSGKKSLTWKQRVEIARDVAEALDYLHNYITPPHIHKNLESTNILLDSNFRAKIANFGVARILDEGDLDLQLTRHVEGTQGYLAPEYVENGVITSKLDVFAFGVAVLELLSGREAVTIHKKKEGEEEVEMLCKVINSVLGGENVREKLKEFMDPSLGNEYPLELAYTMAQLAKSCVATDLNSRPSVTQVLTTLS

SEQ ID NO: 564 - protein, 50 aa, Oryza sativa
FDQSSGNCFLFNQIGSLQHKGGNTTRFASFIKVSSRGKGGSDSGSGKHNT

SEQ ID NO: 565 - protein, 50 aa, Arabidopsis thaliana
GQLLSEPSSFSGNPNLCIPHSFSASNNSRSALKYCKDQSKSRKSGLSTWQ

SEQ ID NO: 566 - protein, 50 aa, Arabidopsis thaliana
DNIFFFTPVLVPLTTEPTKIVISPSPPPPPVVATPPQTPVDPPGSSSSHK

SEQ ID NO: 567 - protein, 24 aa, Oryza sativa
IIIVIMLGTLAIIGVLIYIGFWIY

SEQ ID NO: 568 - protein, 24 aa, Arabidopsis thaliana
IVLIAVLSSLLVLVVVLALVFICL

SEQ ID NO: 569 - protein, 24 aa, Arabidopsis thaliana
WIYIGIGIGAGLLLLLSILALCFY

SEQ ID NO: 570 - DNA, 3612 bp, Artificial Seqence
  Encodes fusion protein
atgagcaaggccctcctccacctccacttcctcagcctcttcctcctctgctgcgtgtgccacagcagcatcttcaccctcaacttccacttcaccggcatcgtggcctgcaggccgcaccagatccaggccttcaccaagttcaccaacgagttcgacaccaggggctgcaacaacagcgacaccttcaacggcgtgtggtgcgacaacagcaccggcgccgtggccgtgctccagctcaggaagtgcctcagcggcaccctcaagagcaacagcagcctcttcggcttccaccagctcaggtacgtggacctccagaacaacaacctcaccagcagcagcctcccgagcggcttcggcaacctcaagaggctcgagggcctcttcctcagcagcaacggcttcctcggccaggtgccgagcagcttcagcaacctcaccatgctcgcccagctcgacctcagctacaacaagctcaccggcagcttcccgctcgtgaggggcctcaggaagctcatcgtgctcgacctcagctacaaccacttcagcggcaccctcaacccgaacagcagcctcttcgagctccaccagctcaggtacctcaacctcgccttcaacaacttcagcagcagcctcccgagcaagttcggcaacctccacaggctcgagaacctcatcctcagcagcaacggcttcagcggccaggtgccgagcaccatcagcaacctcaccaggctcaccaagctctacctcgaccagaacaagctcaccagcagcttcccgctcgtgcagaacctcaccaacctctacgagctcgacctcagctacaacaagttcttcggcgtgatcccgagcagcctcctcaccctcccgttcctcgcccacctcgccctcagggagaacaacctcgccggcagcgtggaggtgagcaacagcagcaccagcagcaggctcgagatcatgtacctcggcagcaaccacttcgagggccagatcctcgagccgatcagcaagctcatcaacctcaagcacctcgacctcagcttcctcaacaccagctacccgatcgacctcaagctcttcagcagcctcaagagcctcaggagcctcgacctcagcggcaacagcatcagcagcgccagcctcagcagcgacagctacatcccgctcaccctcgagatgctcaccctcaggcactgcgacatcaacgagttcccgaacatcctcaagaccctcaaggagctcgtgtacatcgacatcagcaacaacaggatgaagggcaagatcccggagtggctctggagcctcccgctcctccagagcgtgaccctcggcaacaactacttcaccggcttccagggcagcgccgagatcctcgtgaacagcagcgtgctcctcctctacctcgacagcaacaacttcgagggcgccctcccggacctcccgctcagcatcaagggcttcggcgtggccagcaacagcttcaccagcgagatcccgctcagcatctgcaacaggagcagcctcgccgccatcgacctcagctacaacaacttcaccggcccgatcccgccgtgcctcaggaacctcgagctcgtgtacctcaggaacaacaacctcgagggcagcatcccggacgccctctgcgacggcgccagcctcaggaccctcgacgtgagccacaacaggctcaccggcaagctcccgaggagcttcgtgaactgcagcagcctcaagttcctcagcgtgatcaacaacaggatcgaggacaccttcccgttctggctcaaggccctcccgaacctccaggtgctcaccctcaggagcaacaggttctacggcccgatcagcccgccgcaccagggcccgctcggcttcccggagctcaggatcttcgagatcagcgacaacaagttcaccggcagcctcccgccgaactacttcgtgaactggaaggccagcagcaggaccatgaaccaggacggcggcctctacatggtgtacgaggagaagctcttcgacgagggcggctacggctacaccgacgccctcgacctccagtacaagggcctccacatggagcaggccaaggccctcaccagctacgccgccatcgacttcagcggcaacaggctcgagggccagatcccggagagcatcggcctcctcaaggccctcatcgccgtgaacatcagcaacaacgccttcaccggccacatcccgctcagcatggccaacctcgagaacctcgagagcctcgacatgagcaggaaccagctcagcggcaccatcccgaacggcctcggcagcatcagcttcctcgcctacatcaacgtgagccacaaccagctcaccggcgagatcccgcagggcacccagatcaccggccagagcaagagcagcttcgagggcaacgccggcctctgcggcctcccgctcaaggagagctgcttcggcaccggcgccccgccgatgtaccaccagaagcaggaggacaaggaggaggaggaggaggaggaggaggaggaggaggaggtgctcaacggcaggatcgtgctcatcgccgtgctcagcagcctcctcgtgctcgtggtggtgctcgccctcgtgttcatctgcctcaggaggaggaagggcaggccggagaaggacgcctacgtgttcacccaggaggagggcccgagcctcctcctcaacaaggtgctcgccgccaccgacaacctcaacgagaagtacaccatcggcaggggcgcccacggcatcgtgtacagggccagcctcggcagcggcaaggtgtacgccgtgaagaggctcgtgttcgccagccacatcagggccaaccagagcatgatgagggagatcgacaccatcggcaaggtgaggcacaggaacctcatcaagctcgagggcttctggctcaggaaggacgacggcctcatgctctacaggtacatgccgaagggcagcctctacgacgtgctccacggcgtgagcccgaaggagaacgtgctcgactggagcgccaggtacaacgtggccctcggcgtggcccacggcctcgcctacctccactacgactgccacccgccgatcgtgcacagggacatcaagccggagaacatcctcatggacagcgacctcgagccgcacatcggcgacttcggcctcgccaggctcctcgacgacagcaccgtgagcaccgccaccgtgaccggcaccaccggctacatcgccccggagaacgccttcaagaccgtgaggggcagggagagcgacgtgtacagctacggcgtggtgctcctcgagctcgtgaccaggaagagggccgtggacaagagcttcccggagagcaccgacatcgtgagctgggtgaggagcgccctcagcagcagcaacaacaacgtggaggacatggtgaccaccatcgtggacccgatcctcgtggacgagctcctcgacagcagcctcagggagcaggtgatgcaggtgaccgagctcgccctcagctgcacccagcaggacccggccatgaggccgaccatgagggacgccgtgaagctcctcgaggacgtgaagcacctcgccaggagctgcagcagcgacagcgtgagg

SEQ ID NO: 571 - protein, 1204 aa, Artificial Sequence
  Fusion protein
MSKALLHLHFLSLFLLCCVCHSSIFTLNFHFTGIVACRPHQIQAFTKFTNEFDTRGCNNSDTFNGVWCDNSTGAVAVLQLRKCLSGTLKSNSSLFGFHQLRYVDLQNNNLTSSSLPSGFGNLKRLEGLFLSSNGFLGQVPSSFSNLTMLAQLDLSYNKLTGSFPLVRGLRKLIVLDLSYNHFSGTLNPNSSLFELHQLRYLNLAFNNFSSSLPSKFGNLHRLENLILSSNGFSGQVPSTISNLTRLTKLYLDQNKLTSSFPLVQNLTNLYELDLSYNKFFGVIPSSLLTLPFLAHLALRENNLAGSVEVSNSSTSSRLEIMYLGSNHFEGQILEPISKLINLKHLDLSFLNTSYPIDLKLFSSLKSLRSLDLSGNSISSASLSSDSYIPLTLEMLTLRHCDINEFPNILKTLKELVYIDISNNRMKGKIPEWLWSLPLLQSVTLGNNYFTGFQGSAEILVNSSVLLLYLDSNNFEGALPDLPLSIKGFGVASNSFTSEIPLSICNRSSLAAIDLSYNNFTGPIPPCLRNLELVYLRNNNLEGSIPDALCDGASLRTLDVSHNRLTGKLPRSFVNCSSLKFLSVINNRIEDTFPFWLKALPNLQVLTLRSNRFYGPISPPHQGPLGFPELRIFEISDNKFTGSLPPNYFVNWKASSRTMNQDGGLYMVYEEKLFDEGGYGYTDALDLQYKGLHMEQAKALTSYAAIDFSGNRLEGQIPESIGLLKALIAVNISNNAFTGHIPLSMANLENLESLDMSRNQLSGTIPNGLGSISFLAYINVSHNQLTGEIPQGTQITGQSKSSFEGNAGLCGLPLKESCFGTGAPPMYHQKQEDKEEEEEEEEEEEEVLNGRIVLIAVLSSLLVLVVVLALVFICLRRRKGRPEKDAYVFTQEEGPSLLLNKVLAATDNLNEKYTIGRGAHGIVYRASLGSGKVYAVKRLVFASHIRANQSMMREIDTIGKVRHRNLIKLEGFWLRKDDGLMLYRYMPKGSLYDVLHGVSPKENVLDWSARYNVALGVAHGLAYLHYDCHPPIVHRDIKPENILMDSDLEPHIGDFGLARLLDDSTVSTATVTGTTGYIAPENAFKTVRGRESDVYSYGVVLLELVTRKRAVDKSFPESTDIVSWVRSALSSSNNNVEDMVTTIVDPILVDELLDSSLREQVMQVTELALSCTQQDPAMRPTMRDAVKLLEDVKHLARSCSSDSVR

SEQ ID NO: 572 - DNA, 3696 bp, Artificial Sequence
  Encodes fusion protein
atgagcaaggccctcctccacctccacttcctcagcctcttcctcctctgctgcgtgtgccacagcagcatcttcaccctcaacttccacttcaccggcatcgtggcctgcaggccgcaccagatccaggccttcaccaagttcaccaacgagttcgacaccaggggctgcaacaacagcgacaccttcaacggcgtgtggtgcgacaacagcaccggcgccgtggccgtgctccagctcaggaagtgcctcagcggcaccctcaagagcaacagcagcctcttcggcttccaccagctcaggtacgtggacctccagaacaacaacctcaccagcagcagcctcccgagcggcttcggcaacctcaagaggctcgagggcctcttcctcagcagcaacggcttcctcggccaggtgccgagcagcttcagcaacctcaccatgctcgcccagctcgacctcagctacaacaagctcaccggcagcttcccgctcgtgaggggcctcaggaagctcatcgtgctcgacctcagctacaaccacttcagcggcaccctcaacccgaacagcagcctcttcgagctccaccagctcaggtacctcaacctcgccttcaacaacttcagcagcagcctcccgagcaagttcggcaacctccacaggctcgagaacctcatcctcagcagcaacggcttcagcggccaggtgccgagcaccatcagcaacctcaccaggctcaccaagctctacctcgaccagaacaagctcaccagcagcttcccgctcgtgcagaacctcaccaacctctacgagctcgacctcagctacaacaagttcttcggcgtgatcccgagcagcctcctcaccctcccgttcctcgcccacctcgccctcagggagaacaacctcgccggcagcgtggaggtgagcaacagcagcaccagcagcaggctcgagatcatgtacctcggcagcaaccacttcgagggccagatcctcgagccgatcagcaagctcatcaacctcaagcacctcgacctcagcttcctcaacaccagctacccgatcgacctcaagctcttcagcagcctcaagagcctcaggagcctcgacctcagcggcaacagcatcagcagcgccagcctcagcagcgacagctacatcccgctcaccctcgagatgctcaccctcaggcactgcgacatcaacgagttcccgaacatcctcaagaccctcaaggagctcgtgtacatcgacatcagcaacaacaggatgaagggcaagatcccggagtggctctggagcctcccgctcctccagagcgtgaccctcggcaacaactacttcaccggcttccagggcagcgccgagatcctcgtgaacagcagcgtgctcctcctctacctcgacagcaacaacttcgagggcgccctcccggacctcccgctcagcatcaagggcttcggcgtggccagcaacagcttcaccagcgagatcccgctcagcatctgcaacaggagcagcctcgccgccatcgacctcagctacaacaacttcaccggcccgatcccgccgtgcctcaggaacctcgagctcgtgtacctcaggaacaacaacctcgagggcagcatcccggacgccctctgcgacggcgccagcctcaggaccctcgacgtgagccacaacaggctcaccggcaagctcccgaggagcttcgtgaactgcagcagcctcaagttcctcagcgtgatcaacaacaggatcgaggacaccttcccgttctggctcaaggccctcccgaacctccaggtgctcaccctcaggagcaacaggttctacggcccgatcagcccgccgcaccagggcccgctcggcttcccggagctcaggatcttcgagatcagcgacaacaagttcaccggcagcctcccgccgaactacttcgtgaactggaaggccagcagcaggaccatgaaccaggacggcggcctctacatggtgtacgaggagaagctcttcgacgagggcggctacggctacaccgacgccctcgacctccagtacaagggcctccacatggagcaggccaaggccctcaccagctacgccgccatcgacttcagcggcaacaggctcgagggccagatcccggagagcatcggcctcctcaaggccctcatcgccgtgaacatcagcaacaacgccttcaccggccacatcccgctcagcatggccaacctcgagaacctcgagagcctcgacatgagcaggaaccagctcagcggcaccatcccgaacggcctcggcagcatcagcttcctcgcctacatcaacgtgagccacaaccagctcaccggcgagatcccgcagggcacccagatcaccggccagagcaagagcagcttcgagggcaacgccggcctctgcggcctcccgctcaaggagagctgcttcggcaccggcgccccgccgatgtaccaccagaagcaggaggacaaggaggaggaggaggaggaggaggaggaggaggaggaggtgctcaacggcaggatcgtgctcatcgccgtgctcagcagcctcctcgtgctcgtggtggtgctcgccctcgtgttcatctgcctcaggaggaggaagggcaggccggagaaggacgcctacgtgttcacccaggaggagggcccgagcctcctcctcaacaaggtgctcgccgccaccgacaacctcaacgagaagtacaccatcggcaggggcgcccacggcatcgtgtacagggccagcctcggcagcggcaaggtgtacgccgtgaagaggctcgtgttcgccagccacatcagggccaaccagagcatgatgagggagatcgacaccatcggcaaggtgaggcacaggaacctcatcaagctcgagggcttctggctcaggaaggacgacggcctcatgctctacaggtacatgccgaagggcagcctctacgacgtgctccacggcgtgagcccgaaggagaacgtgctcgactggagcgccaggtacaacgtggccctcggcgtggcccacggcctcgcctacctccactacgactgccacccgccgatcgtgcacagggacatcaagccggagaacatcctcatggacagcgacctcgagccgcacatcggcgacttcggcctcgccaggctcctcgacgacagcaccgtgagcaccgccaccgtgaccggcaccaccggctacatcgccccggagaacgccttcaagaccgtgaggggcagggagagcgacgtgtacagctacggcgtggtgctcctcgagctcgtgaccaggaagagggccgtggacaagagcttcccggagagcaccgacatcgtgagctgggtgaggagcgccctcagcagcagcaacaacaacgtggaggacatggtgaccaccatcgtggacccgatcctcgtggacgagctcctcgacagcagcctcagggagcaggtgatgcaggtgaccgagctcgccctcagctgcacccagcaggacccggccatgaggccgaccatgagggacgccgtgaagctcctcgaggacgtgaagcacctcgccaggagctgcagcagcgacagcgtgaggagcgactacaaggaccacgacggcgactacaaggaccacgacctcgacgccgccgccgccgactacaaggacgacgacgacaag

SEQ ID NO: 573 - protein, 1232 aa, Artificial Sequence
  Fusion protein
MSKALLHLHFLSLFLLCCVCHSSIFTLNFHFTGIVACRPHQIQAFTKFTNEFDTRGCNNSDTFNGVWCDNSTGAVAVLQLRKCLSGTLKSNSSLFGFHQLRYVDLQNNNLTSSSLPSGFGNLKRLEGLFLSSNGFLGQVPSSFSNLTMLAQLDLSYNKLTGSFPLVRGLRKLIVLDLSYNHFSGTLNPNSSLFELHQLRYLNLAFNNFSSSLPSKFGNLHRLENLILSSNGFSGQVPSTISNLTRLTKLYLDQNKLTSSFPLVQNLTNLYELDLSYNKFFGVIPSSLLTLPFLAHLALRENNLAGSVEVSNSSTSSRLEIMYLGSNHFEGQILEPISKLINLKHLDLSFLNTSYPIDLKLFSSLKSLRSLDLSGNSISSASLSSDSYIPLTLEMLTLRHCDINEFPNILKTLKELVYIDISNNRMKGKIPEWLWSLPLLQSVTLGNNYFTGFQGSAEILVNSSVLLLYLDSNNFEGALPDLPLSIKGFGVASNSFTSEIPLSICNRSSLAAIDLSYNNFTGPIPPCLRNLELVYLRNNNLEGSIPDALCDGASLRTLDVSHNRLTGKLPRSFVNCSSLKFLSVINNRIEDTFPFWLKALPNLQVLTLRSNRFYGPISPPHQGPLGFPELRIFEISDNKFTGSLPPNYFVNWKASSRTMNQDGGLYMVYEEKLFDEGGYGYTDALDLQYKGLHMEQAKALTSYAAIDFSGNRLEGQIPESIGLLKALIAVNISNNAFTGHIPLSMANLENLESLDMSRNQLSGTIPNGLGSISFLAYINVSHNQLTGEIPQGTQITGQSKSSFEGNAGLCGLPLKESCFGTGAPPMYHQKQEDKEEEEEEEEEEEEVLNGRIVLIAVLSSLLVLVVVLALVFICLRRRKGRPEKDAYVFTQEEGPSLLLNKVLAATDNLNEKYTIGRGAHGIVYRASLGSGKVYAVKRLVFASHIRANQSMMREIDTIGKVRHRNLIKLEGFWLRKDDGLMLYRYMPKGSLYDVLHGVSPKENVLDWSARYNVALGVAHGLAYLHYDCHPPIVHRDIKPENILMDSDLEPHIGDFGLARLLDDSTVSTATVTGTTGYIAPENAFKTVRGRESDVYSYGVVLLELVTRKRAVDKSFPESTDIVSWVRSALSSSNNNVEDMVTTIVDPILVDELLDSSLREQVMQVTELALSCTQQDPAMRPTMRDAVKLLEDVKHLARSCSSDSVRSDYKDHDGDYKDHDLDAAAADYKDDDDK

1. An isolated nucleic acid molecule encoding an engineered AtRLP23 protein, the nucleic acid molecule comprising a nucleotide sequence encoding a polypeptide which comprises in operable linkage: a leucine-rich-repeat (LRR) domain derived from AtRLP23, an extra-juxtamembrane (eJM) domain, a transmembrane (TM) domain, and optionally a kinase domain derived from a receptor-like kinase (RLK).

2. The nucleic acid molecule of claim 1, wherein the engineered AtRLP23 protein is capable of recognizing in a plant a pathogen-associated molecular pattern derived from a Nep1-like protein (NLP).

3. The nucleic acid molecule of claim 1, wherein:
(a) the kinase domain is a kinase domain derived from OsXA21, AtSOBIR1, AtPEPR1, or AtEFR;
(b) the eJM domain is an eJM domain derived from at least one of AtRLP1, AtRLP23, AtRLP30, AtRLP42, Cf-4, and Ve1;
(c) the eJM domain is eJM(EEEE/ADQ−); and/or
(d) the polypeptide further comprises a signal peptide (SP) domain operably linked to the LRR domain.

4-6. (canceled)

7. The nucleic acid molecule of claim 3, wherein at least one of the SP domain and the TM domain is derived from a plasmalemma-bound protein and optionally, wherein the plasmalemma-bound protein is a pattern recognition receptor (PRR).

8. (canceled)

9. The nucleic acid molecule of claim 7, wherein the PRR is selected from the group consisting of AtRLP1, AtRLP23, AtRLP30, AtRLP42, Cf-4, Ve1, AtSOBIR1, and AtEFR.

10-12. (canceled)

13. An engineered AtRLP23 protein encoded by the encoded by the nucleic acid molecule of claim 1.

14. An expression cassette comprising the nucleic acid molecule of claim 1 and an operably linked promoter for expression in a host cell of interest or a vector comprising the nucleic acid molecule or the expression cassette.

15-16. (canceled)

17. A plant, plant cell, or other host cell comprising the nucleic acid molecule of claim 1.

18. A plant or plant cell comprising stably incorporated in its genome a polynucleotide construct comprising a nucleotide sequence encoding an engineered AtRLP23 protein, wherein the nucleotide sequence encodes a polypeptide comprising in operable linkage: a leucine-rich-repeat (LRR) domain derived from AtRLP23, an extra-juxtamembrane (eJM) domain, a transmembrane (TM) domain, and a kinase domain derived from a receptor-like kinase (RLK).

19. The plant or plant cell of claim 18, wherein the polypeptide further comprises a signal peptide (SP) domain operably linked to the LRR domain.

20. The plant or plant cell of claim 19, wherein at least one of the SP domain and the TM domain is derived from a plasmalemma-bound protein.

21. The plant or plant cell of claim 20, wherein the plasmalemma-bound protein is a pattern recognition receptor (PRR).

22-24. (canceled)

25. The plant or plant cell of claim 18, wherein the engineered AtRLP23 protein is capable of recognizing in a plant or plant cell a pathogen-associated molecular pattern derived from a Nep1-like protein (NLP).

26. The plant or plant cell of claim 18, wherein the polynucleotide construct further comprises a promoter operably linked for the expression of the nucleotide sequence in the plant or plant cell.

27. The plant or plant cell of any one of claim 18, wherein the plant or a plant regenerated from the plant cell comprises enhanced resistance to at least one plant disease caused by a plant pathogen, relative to the resistance of a control plant lacking the polynucleotide construct.

28. (canceled)

29. The plant or plant cell of claim 27, wherein the plant pathogen comprises an NLP.

30. A method for making an engineered AtRLP23 protein, the method comprising producing a polypeptide comprising in operable linkage: a leucine-rich-repeat (LRR) domain derived from AtRLP23, an extra-juxtamembrane (eJM) domain, a transmembrane (TM) domain, and a kinase domain derived from a receptor-like kinase (RLK).

31-39. (canceled)

40. An isolated, engineered AtRLP23 protein produced by the method of claim 30, an isolated nucleic acid molecule encoding the engineered AtRLP23 protein, or a plant or plant cell comprising the engineered AtRLP23 protein and/or the nucleic acid molecule.

41. A method for making a nucleic acid molecule encoding an engineered AtRLP23 protein, the method comprising synthesizing a nucleic acid molecule which encodes a polypeptide comprising in operable linkage: a leucine-rich-repeat (LRR) domain derived from AtRLP23, an extra-juxtamembrane (eJM) domain, a transmembrane (TM) domain, and a kinase domain derived from a receptor-like kinase (RLK).

42-50. (canceled)

51. An isolated nucleic acid molecule produced by the method of claim 41, an isolated, engineered AtRLP23 protein encoded by the nucleic acid molecule, or a plant or plant cell comprising the nucleic acid molecule and/or the engineered AtRLP23 protein.

52. (canceled)

53. A method for enhancing the resistance of a plant to at least one plant pathogen, the method comprising modifying a plant cell to be capable of expressing
the engineered AtRLP23 protein encoded by the nucleic acid molecule of claim 1.

54-58. (canceled)

59. A plant or plant cell produced by the method of claim 53.
